United States Patent Application Publication US 2012/0070457 A1 - sequence listing, part 12

SEQ ID NO: 67782 - DNA, 1413 bp, Neisseria meningitidis
gtgaaaatcctcattttaggcaacggacaggtaggttctaccgtcgcacaaaaccttgccgccatacccaacaacgacgtaaccgttatcgacatcgacgaaaaagcattgcaggaaacaggcagccgcctcgatgtccaaaccgttttcggcaacggcgcatcccccttcacattagaacgcgccggcgcggaagatgccgacttgctgctcgcgctctcccgcagcgacgaaaccaacatcgtcgcctgcaaagttgccgccgacctgttcaacatccccggccgcatcgcgcgcgtccgttccagcgaatacctcgaatacctcagccccaagctcgaaaacaacgaaaacggcagcctttccatattcggcataaccgaaaccatcagccccgaacagctcgttaccgaacagcttgccggcctgatagactgcccgggcgcattgcaggttttacgttttgcagacgaccgcgtgcggatggtcatcatacaggcgcggcgcggcggactgcttgtcggacgcagcattgccgacatcgcccaagatttgcccgacggggccgactgccaaatctgcgccgtttaccgcaacaaccgcctcatcgtccccgcgccgcaaaccgtcatcatcgaaggcgacgaaatcctgtttgccgccgccgccgaaaacatcggcgcggtcatacccgaattgcgccccaaagaaaccagcacccgccgcatcatgattgccggcggcggcaacatcggctaccgtctcgccaagcagctcgaacacgcatacaacgtcaaaatcatcgaatgccggccgcgccgtgccgaatggatagccgaaaacctcgacaacaccctcgtcctgcaaggttcggcaaccgacgaaaccctgctcgacaacgaatacatcgacgaaatcgacgtattctgcgccctgaccaacgacgacgaaagcaacattatgtccgcccttttggcgaaaaacctcggcgcgaagcgcgtcatcggcatcgtcaaccgctcaagctacgtcgatttgctcgaaggcaacaaaatcgacatcgtcgtctccccccacctcatcaccatcggctcgatactcgcccacatccggcgcggcgacatcgttgccgtccaccccatccggcgcggcacggcggaagccatcgaagtcgtcgcacacggcgacaaaaaaacttccgccatcatcggcaggcgcatcagcggtatcaaatggccagaaggctgccacattgccgccgtcgtccgcgccgaaaccggcgaaaccattatgggacaccataccgaaaccgtcatccaagacggcgaccacatcatctttttcgtctcgcgccggcgcatcctgaacgaactggaaaaactcatccaggtcaaaatgggctttttcggataa

SEQ ID NO: 67783 - DNA, 1635 bp, Neisseria meningitidis
atgaccaaattcattttcgtaaccggcggcgttgtctcctcactgggtaaaggtatcgccgccgcttctattgccgccatcctcgaatcgcgcggcttgaacgttaccatgctcaagctcgatccttatatcaacgtcgatcccggcacgatgagcccgttccaacacggcgaagtgttcgtaaccgacgacggcgcggaaaccgacctcgacttgggacactacgaacggtttatcgattccacgatgacccgccgcaacagcttcagcacgggacaggtgtacgaaaacgttatcgccaaagaacgacggggcgactatttgggcggcacggttcaagtcattccgcacattaccgacgaaatcaaacgacgcatccatgaaggcgcggcaggttacgatgtggcgattgtcgaaatcggcggcacggtcggcgacatcgaatcgctgccgtttttggaagccatccgccagatgcgaagccagttgggacgcaacaacaccctgttcgcccacttgagctacgtcccctacatcgccgctgcaggcgaaatcaaaaccaagccgacccagcacaccgttaaagaaatgttgagcatcggtttgcaacccgacatcctgatttgccgtatggacaggacaatgcctgcggacgaacgccgcaaaatcgccttgttctgcaacgtggaagaacgcgcgattgtcggcagctacgatgtggacagcatctacgaatgccccgaaatgctgcacgaccaaggcatcgataacatcattaccgagcagttgcagcttaatgtgcagcaggcggatttgaccgcgtggaaaaaaatcgtccacgccgtcaaaaatccgaaacacaccgtcaaaatcgcgatggtcggcaaatacgtcgatttgaccgagtcctacaaatcattgattgaagccttgaaacacgcgggtatccacaccgaaaccgacgtgcaaattacctttgtcgacagcgaaagcatcgagaaaaacaaaggcgacgtttccatgctcaaagatatggatgccatcctcgtccccggcggtttcggttcgcgcggcgtggaaggcaaaatcgccgccgtgcgctacgcccgcgaaaacaacgtgccatacttgggcatctgcctcggtatgcagattgcgctgatcgaatacgcccgcgacgtggcaggtttgaaaggtgcgaattccaccgagttcgacctcaaatgcgccgcccccgtcgttgccctgattgacgaatggcaaactgccgacggcagcgtcgaaacccgagacgagtccgccgatttgggcggcacgatgcgtttgggcgcgcaagaagtcgaattgaaagcaggcagcctcgccgccaaaatctacggcagcggacatatccgtgaacgccaccgccaccgctacgaagtcaacaacaactatgttcctcagttggaaaaagcaggcttggttatcggcggcgtatccgccggacgcgaacgcttggtcgaaaccatcgaactgccgaaccatccttggttcttcgcctgccagttccaccccgagtttacctccaatccgcgcaaagggcatcctttgttcaccgcgtttgtcaaagctgcgttgaacaataaaaaagcctga

SEQ ID NO: 67784 - DNA, 2121 bp, Neisseria meningitidis
atgttcgacaaacacgttaaaactttccaatacggcaaccacaccgttactttggaaaccggcgaaattgcccgccaagccgccgctgccgttaaagtctctatgggcgacaccgttgttttggttgccgttaccaccaacaaagaagtgaaagaaggtcaagacttcttccccctgaccgtcgattatttggaacgcacttacgccgcaggtaaaatccccggcggtttcttcaaacgcgaaggcaaacaaagcgaaaaagaaatcctgaccagccgtctgatcgaccgcccgattcgtccgctgttccccgaaggtttctaccacgacatccaaatcgtagcgatggtcgtgtccgtcgatcccgaaatcgattccgacattcctgcaatgttgggcgcgtctgccgcgctggtgttgagcggcgtaccgtttgccggtccgattggtgcggcacgcgtgggttatataaacggcgtgtacgttttgaacccgactaaagccgaattggcgaaatcgcaattggacttggtggtcgccggtacttcaaaagccgtgttgatggtggaatccgaagccaaaatcctgcccgaagacgtgatgctgggcgcggtggtttacggccacgatcaaatgcaggttgccatcaatgcaatcaatgaatttgccgacgaagtcaatccggaactttgggattggaaagcacctgaaaccaatgaggaactggttgccaaagtccgcgggattgccggcgaaaccattaaagaagcgttcaaaatccgtcaaaaacaagcgcgttctgccaagttggacgaagcttggaatgccgtgaaagaagcgttgattaccgaagaaaccgacactttggcagccaacgaaatcaaaggcattttcaaacacttggaagccgatgtcgtccgcagccaaattttggatggccaaccgcgcatcgacggccgcgacacccgcaccgtccgtccgctgaacatccaaaccagcgtattgccgcgcacgcacggttctgcattgtttacccgtggcgaaacccaagctttggccgttgcaactttgggtacttcgcgcgacgagcaaatcatcgacgcgctgtccggcgaatacaccgaccgctttatgctgcactacaactttccgccgtactctaccggcgaagtgggccgcatgggcgcaccgaaacgccgtgaaatcggtcacggccgtttggctaaacgtgcattgttggccgtattgccgaaacctgaagatttcagctacaccatgcgcgtggtctccgaaattaccgaatccaacggctcttcctctatggcttccgtctgcggcggctgcctgagcctgctgtctgccggcgtgcctttgaaagcacacgttgccggtatcgcgatgggtctgattctggaaggcaacaaatttgccgtcctgaccgacattttgggcgacgaagaccacttgggcgatatggactttaaagtggccggtacgaccgaaggcgttaccgcgctgcaaatggacatcaaaatccaaggcattaccaaagaaattatgcaaatcgctttggcacaggccaaagaagcgcgtctgcacatcttggatcagatgaaagccgccgttgcgggcccgcaagagctgtccgcacacgcgccacgcttgttcacgatgaaaatcaaccaagacaaaatccgcgaagttatcggtaagggcggtgaaaccatccgtgcgattaccgctgaaaccggtacggaaatcaatattgccgaagacggtacgattaccattgccgcgaccactcaagaagccggcgatgcggcgaaaaaacgtatcgagcagattactgccgaagtggaagtgggcaaagtgtatgaaggcactgtggtgaaaatcctcgacaacaacgtcggcgcgattgtcagcgtgatgccgggcaaagacggtttggtacacatcagccaaatcgcccatgagcgcgtacgcaatgtcggcgactacctgaaagtcggtcaggtggtgaacgtgaaagcattggaagtggacgacagaggccgtgtccgtctgtccatcaaagccctgctggacgcgcctgcccgtgaggaaaatgccgccgagtaa

SEQ ID NO: 67785 - DNA, 780 bp, Neisseria meningitidis; identical to SEQ ID NO: 45214

SEQ ID NO: 67786 - DNA, 873 bp, Neisseria meningitidis
atgagctggttagataaaatcctgccacccaaaatcaaaaaccgcagcaaagacggttcttccaatgttcccgagggtttgtggcacaaatgtccgtcttgttcggcaaccgtttattcgaccgagttgcagcagaacaatcaggtttgtccgaaatgcaaccaccacaatccgttgtcggcacgacaacgcctgaatctgcttttggatgaggaaggcagggaggaagttgcgggtaatgtcaaaccgatagatcctttgaagtttaaagacggcaaaaaatatccggatcgtttgagtgcggcacgcaagctgaccggggaagatgatgctttggtggtgatgaaaggcaagatgaacggtctgcccgtcgtcgttgccgcgtttgaattccgctttatcggcggttcgatgggttcggttgtgggcgaacgtttcgtacaaggtatccgtcgggcggttgccgacaattgtccgttcgtctgtgtggcggcctccggcggtgcgcgtatgcaggagggtgtgaactcattgatgcagatgacgaaaaccagtgccgcgctgcatttgctgacggaaaaacgcctgccatttatatcggtgttgaccgatccgactatgggcggcgtatccgccagcttcgcatttttgggcgatgtcgtgcttgccgaaccgaacgcgctgatcggttttgccggtccgcgcgtgattgagcagacggtgcgcgaaacgctgccggaaggcttccaacgcgccgagttcctgctggaaaaaggcgcaatcgaccagattgtcgaccgccgcgatatgaagcggcgcatcagtgatttgattacgctgttgtgccgtcaggacaaagtttccgccgcttga

SEQ ID NO: 67787 - DNA, 225 bp, Neisseria meningitidis; identical to SEQ ID NO: 44387

SEQ ID NO: 67788 - DNA, 564 bp, Neisseria meningitidis
atgaaactcatcattctcgaccgcgacggcgtcatcaatcaggaccgcgacgacttcgtcaaatccgttgacgagtggatacctgtcgaaggcagcatggatgcggtggcatttctgacgcaggcaggctgcaccgtcgccgttgccaccaaccaatccggcatcgggcgcaaatattttaccgttcaaaaccttaccgaaatgcacgccaaaatgcaccgcctcgtccgtcaggcaggcggcgaaatcaacggcatctggttctgcccgcacaccgatgccgacaactgcaactgccgcaagcccaaaccgggtatgattgaagacatcatcggacgcttcaacgcccaagcctcggaaacctggctggtcggcgacagcctgcgcgatttgcaggcaatcgatgccgtcggcggcaaacccgcgctggttctgaccggaaaaggcaaaaaaacgctctcccaacacggacacgaattgcccgaacacacacaggttttcgataccctgctcgatttctcacaatacatcatgcaggaaaacaccgcaccgcaagccgactga

SEQ ID NO: 67789 - DNA, 159 bp, Neisseria meningitidis
atgaacccccccctccccatctgcaccctgtcggcactcgccgcctgcaccctttccggacaaggcggcagcagggtttacggcgaaatcaaagcccgagacctttgcgttaccgctcctatcctgctttctgctttctgtcttgcctgctctcgttga

SEQ ID NO: 67790 - DNA, 1083 bp, Neisseria meningitidis
atgcaaaccgcaaacaaaaaaaccatcctcgttaccggcggtgcgggctttatcggttctgccgttgtccgtcatattatccgaaacacccaagattccgtcgtcaacctcgacaaactgacctacgcgggcaatctcgaatcgctgaccgacattgccgataatccccgctatgctttcgagcaagtggacatttgcgaccgcgccgaactcgaccgcgtattcgcacaacaccggcccgatgccgtgatgcacttggcggcggaaagccatgtcgaccgctctatcggttcggcaggcgagtttatccaaaccaatatcgtcggcacattcaacctacttgaagcagcccgcgcctactggcaacaaatgccgtctgaacagcacgaagccttccgtttccaccatatttccaccgatgaagtctatggcgatttaggcggcacggacgatttgtttaccgaaaccgcgccctacgcgccgtccagcccctactctgcctctaaagcgtccagcgaccacctcgtccgcgcgtggttgcgtacttacggcttgccgaccattgtaaccaactgctccaacaactacggtccttaccattttccggaaaaactcattcctttgatgattctgaacgcgcttgacggcaaaccgctgcctgtgtacggcgacggtatgcaaatccgcgactggctgtttgtcgaagatcatgcccgcgcgctgtatcaggttgtaaccgaaggtgttgtcggcgaaacctataatatcggcggccacaatgaaaaagccaatattgaagtcgtcaaaaccatctgcgacctgctggaagagcttgttcctgaaaaaccggcgggtgtggcacgttatgaagatttgattacctttgtcccagaccgccccggccatgatgtgcgctacgccgtcgacgcagccaaaatcaggcgggatttgggctggctgcctttggaaaccttcgagtccggcctccgcaaaaccgtgcaatggtatctggacaacaaaacctggtggcaaaatgtattgaacggcagctatcgtttggaacgtttaggtactggaaaatag

SEQ ID NO: 67791 - DNA, 993 bp, Neisseria meningitidis
  misc_feature 978, 979, 980, 981, 982: 'n' is a, c, g or t
atgagcaccttcttccggcaaaccgcacaagccatgattgccaaacacatcgaccgtttcccgctattgaagttggaccaggtgattgattggcagccgatcgagcagtacctgaaccgtcaaaaaacccgttaccttagagaccaccgcggccgtcccgcctatcccctgttgtccatgttcaaagccgtcctgctcggacaatggcacagtctctccgatcccgaactcgaacacagcctcattacccgcatcgacttcaacctgttttgccgttttgacgaactgagcatccccgattacagcaccttatgccgttaccgcaactggctggcgcaagacgacaccctgtccgaattgctggaactgattaaccgccaactgaccgaaaaaggcttaaaagtagagaaagcatccgccgctgtcgttgacgccaccattattcagaccgccggcagcacacagcgtcaggtcatagaagtcgatgaagaaggacaaatcagcagccaaaccacaccgagtaaggacaaagatgcccgttggatcaagaaaaacggcctctacaaactcggttacaaacaacatacccgtaccgatggggaaggctatatcgagaaactgcacatcacccccgccaatgcccatgagtgcaaacacctgtcgcctttgctggaagggatagccgaaggtacgaccgtctatgccgacaaaggctacgacagtgcggaaaaccggcaacatctggaagaacatcagttgctggacggcattatgcgcaaagcctgccgcaaccgtccgctgacggaggcacaaaccaaacgcaaccgatatttgtcgaagacccgttatgtggttgaacaaagcttcggtacgctgcaccgtaaattccgctatgcgcggtcaacctatttcggactgattaaagtgagtgcgcaaagccatctgaaggcgatgtgtttgaacctgttgaaagccgcnnnnncacacacttaa

SEQ ID NO: 67792 - DNA, 513 bp, Neisseria meningitidis
gtgatttccgcctttcagacggctgggacggcaatgactgacaacctaatacagatagcaacgccgatattgactgttatcggcgtttttgttgccgcttacggcatcatgaggaatacagaaaacgccaaaaagcgcgccaccatcgacatgatcatggccgaacgtaacaatgccgcccttcaagaagccataaccatagtaaacgggctggcaaaaacagacggatgcatactcgccacctatacatcggataccccggacaagaagaaagaccgtgaagccatactgacagttttaaaccagcgcgaatttgtctgtgcgggcgtattaggcggagcactgcacgagaaaatgtataaagatttcgaatactccatgctgttacgtgactgggacaacctaagcagcttcatttttgaaatacgccgtatcaggagcgcaccgacggcctttcaagaatttgaagccgtagcccgaaaatggaagaaaaagcctctgaaaaccaaatag

SEQ ID NO: 67793 - DNA, 546 bp, Neisseria meningitidis
atgcttaaaacatcttttgccgtgttgggcggctgcctgctgcttgccgcctgcggcaaatccgaaaatacggcggaacagccgcaaaatgcggtacaaagcgcgccgaaaccggttttcaaagtcaaatacatcgacaatacggcgattgccggtttggctttgggacaaagcagcgaaggcaaaaccaacgacggcaaaaaacaaatcagttatccgattaaaggcttgccggaacaaaatgtcgtccggctgaccggaaagcatcccggcgacttggaagccgtcggcggcaaatgcatggaaaccgacggaaagggcgcgccttcgggctgggcggcaaacggcgtgtgccataccttgtttgccaaactggtgggcaatatcgccgaagacggcggcaaactgacggattacctgatttcgcattccgccctgcaaccctatcaggcaggcaaaagcggctatgccgccgtgcagaacggacgctatgtgctggaaatcgacagcgagggggcgttttatttccgccgccgccattattga

SEQ ID NO: 67794 - DNA, 774 bp, Neisseria meningitidis
atgaaaccgaaaatccaaaggcacggagagattttaagccttgtccgccggcatcagtttatgtcggtggacgagcttgccgccgcattggacgttaccccgcagacgatacgccgcgacatccgcgaattggaggatgctggcagcctgaaacgccaccacggcggcgcatcctcgggcggaaacttgccggaggggctgcctgccagccgccaaattcaatgtcaaaacgaaaaaaacgccattgcccggctgattgcggaacatattcccgacgagtcatcgctgtttgtcagtatcggcacgacgatggaagccgtggcatcggagctggtgagacggcgcggcagcctgagggtgattaccaacaatatccacgtcgcctccatcgtttcggcgcggacggattacacggtcatcatcacttccggagtcgtccgccctttggacggcggcattaccggcgtggcaaccgtcgattttatcaaccagttcaaagtcgattatgccgtgatgagtacgcacggcgtggaaagcgacggttcgcttttggacgacgactacaaagaagtcagcgtgatgcaggcgatgattgccaacgcgcgcgtccgcttcctcggcgtggaccacagtaaattccgcagcaacgcgctggtcaggctcggcgacattacggcgtttgacaaagtatttaccgaccggctgcccgataccgcgatgcagaagatgctgaaagaggcgggggtggaatgcctgattgccgatgccgtctga

SEQ ID NO: 67795 - DNA, 432 bp, Neisseria meningitidis
atggcgggcggtcaggcaatcgatttggcaaatgtcggcaaacaaatggttcaagccgatttggaacagatgcacagcctgaaaacgggtgcgctaatccgtgcggcggttttattgggggcgatgtcctgcccgaatctgtctgaagacagtctggcggtattggacgcttacgcggcaaaactggggctggcgttccaagtcattgacgatgtgttggattgtgaagcggacacggcgactttgggcaaaacggcgggcaaagacgcagacaacgacaagccgacttatgtgaaactgatgggcttggaagcggcgcgctcatacgcacacaaactggttgccgaagcggtcgcgctgctcgaacccttcggcgacaaagccctgcgcctgcggcagttggcagaatttgcagtcgcccgcaaatattaa

SEQ ID NO: 67796 - DNA, 567 bp, Neisseria meningitidis
atgccgtctgaagcctgttggcgtttcagacggcatattctgattgaaaagatgatgacactgaaaaccgccccgctcaaacgccgctttgccgccatgctgtacgaaatgctgctggtcggtgcggcaacctgtttggcagcattgtttgccggtattgccgccatttttctgaatcccgtttctatcgcggtttctgcattggtaacgagtatcctgataatgggatcatggtggctttattttcgcgccaactggcacggtcaggggcagaccttggcgatgaggacatggaaaatcggcttgtgcgaccttaacggcatacagccgtctttgcacctgctgcgcctgcgctttatttgggcgtgcatatttatcgtcttcattcctatgcttgcttatgccggattacgccacttcctcggcattccgcccaagggcgcggccggcgcggcattgatttggctgattttaccgtgggggttcgcactgctgaatcccgatcggcagtttctgtatgattttcttgcaggaacaagattggtggcggtcaaaggaaagccttaa

SEQ ID NO: 67797 - DNA, 720 bp, Neisseria meningitidis
atgaaagacgatgttttgaaacagcaggcgcacgcggcgatacagaagagactgggctacgcgttccgcgatatttcgcttttgcggcaggctttgacgcacaggagccatcatgcgaagcacaacgagcggttcgagtttgtcggtgattcgattttgaattatacggtggcgcggatgctgtttgacgcgtttccgaagttgaccgagggcgagttgtcgcggttgcgggcaagtctggtcaatgagggcgtgctggcggaaatggcggcggaaatgaatgtcggcgacggtctgtacttgggggcgggcgagttgaagagcggcggcttcagacggccttcgatactggcggacgcgatggaggcgatgtttgcggcggtcagcttcgatgccgatttcaacacggcggaaaaggtggtgcgccatttgtttgccgaccgcgtccggtgtgccgatttccaaaatcaggcaaaagacggcaaaactgctttgcaggaggcgttgcaggcacgccgctttgctttgccgaaataccgtatcgaagagcaaatcggccatgccaacgacagtatgtttgtggtttcctgcgatttgggcgaactgggtttcgtgtgccgtgccaaagggacgagccgtaaggcggcggagcagtcggcggcgaaagaggcgctgcagtggctggaagaaaagctgccgttgaaaaagaaaaagaaatga

SEQ ID NO: 67798 - DNA, 1065 bp, Neisseria meningitidis
atgactcttttaaaaaacgatactttcctccgcgccctgctcaaacagcccgtcgaatacacgccgatttggatgatgcgccaggcggggcgttatctgcccgaatacaaagccacacgcgcgaaagcgggcagcttcctcgatttgtgcaaaaacaccgaattggcgaccgaagttaccatccaacctttggaacgcttcgatttggacgcggcgattttgttttccgacatcctgaccgtccccgacgcaatgggcttgggactgtattttgccgaaggcgaaggcccgaaattcaaacgcgccctgcaacacgaggacgacattgccaaattgcacgtccccgatatggaaaaactgcaatacgtctttgatgccgtcagctccatccgtaaagcactggacggccgcgtaccgcttatcggcttctccggcagcccgttcacacttgcctgctacatggttgaaggtggcagcagcaaagaattccgcaccatcaaaaccatgatgtactcgcgccccgatttgctgcacaaaatcctcgataccaatgctcaagccgttaccgcctatctcaacgcccaaatcgacgcgggcgcgcaggcggtgcagattttcgatacttggggcggcgtgttgagcgacgcggcgtttaaagaattcagcctcaaatacatccgccaaatcgttgccggattgaaacgcgaaagcgaaggcagacgcgttcccgtcatcgtgtttgccaaaggcggcggactgtggctggaaagcatggcagaaattggtgcggacgccttgggcttggactggacgtgcaacatcggcgaagcacgccgccgcgtcggaaaccaagtcgccctgcaaggtaacttcgacccgtccgccctcttcggtacgccggaatccatccgcgccgaagtcgcacgtatcctagccgactacggacacggcagcggccatgtcttcaacctcggacacggcatcaaccaacacgccgaccccgaacacgccaaaatcttagtcgacaccgtacacgagctgtcgcggcagtatcacggcgggtaa

SEQ ID NO: 67799 - DNA, 756 bp, Neisseria meningitidis
atgatggatttggatttgttaagtgaagaagcccgccgcgaaatgctggcgtgtgctgaagaagccgtaccgtctgaaatgtgcggggttttggttttcagttatgaaggctatgagtttctgcctttgtccaattgcgccgaaaatccgcatgaaacctttgagatttccgctgacgactggatggcggcggagcgcgtcggcgagattgtggcagtcgtgcattcccatccgcgcggcgagccgtttttatcgggtgcagacagacggatgcaggtcgaaacgggcttgccttggattttggttacacaaggccgtctgaaactgttccgccccgttccgcatttgcgcgggcgtgtattcgaatacggcaagacggattgcggcgcgctggtgcgcgatgccttcatgctgatggggctggtttttcccgaccatccacgcggtgatatggatgaggatgcggcggaaggctttttggaaaagcatttggaaaactgcgggttttcccgtgtttcagacggcctttgcgccggcgatgtggtcttgacggcaacgggcgggcatgcgtcccatgccgtcctgtatttgggcaacgactggatgctgcaccatgcctacaatcaattgagctgccgtgtaccttatacccgctattgggcggatgttacgcacagcgtttggcggcatcccgatttcgagccggccatgatgcaggcacttgagaacgattttacccatatggagcaagcatga

SEQ ID NO: 67800 - DNA, 765 bp, Neisseria meningitidis
atgtgttcctgccttgttgtcaaaaataccgttatcggaagcggacgcaccaaaatcgccgtgccgcttgtcgcccgcgatgccgccgaactttccgccgtacttgagcaaatcaaaaatatgcccttcgatattgcggagttccgcgccgactttttggaatgcgcgggcagtatcggcgaaatattgcaccacacgcagaccgtccgcgacgcgctgcccgacaagccgctgctgtttacgttcagacggcatggcgaaggcggctcgttcccgtgttcggacgattattattttaaactgctcgacgcgctgatcgaaagtcgcctgcccgacatcatcgacatcgagctgttttccggcgaaaccgccgtccggtgcgccgtggcaaatgctcaaaaaaacggcatcgccgccctgctctgcaatcatgagtttcaccgcacgccgccgcaagaagaaatcgtatgccgtctgaaacagatggaggactgcggcgcggacatctgcaaaattgcggtgatgccgcaaagcgcggaagatgtgctgactttgctttccgccacgctcaaagcgaaagagcttgccgccaaaccgattgttacgatgtcgatggggcagacgggggcggtcagccggcttgccggacaggtgttcggctcaagcatcacgttcggttcgggaacgcaaaactccgcgccggggcaaatcggcgtatccgccctccgtgcgacactcgactgcctcgaaaacggagcagactga

SEQ ID NO: 67801 - DNA, 1152 bp, Neisseria meningitidis
atgagtaatagagaccaactttttaaagccccgccgtttgaaaatcacagcccgctgacttggtatcaggctgcctcacaactgcccaacttcatccgcgacgacgcgcaggcagccaccatcgaacacctcgatcggctttggaccgaattgatgatgttcaaacgcaaaagaaaccgttttttaggcaggagtttgcgttccccgcaagtccccaaagggctttatttctatggcggggtcggacgcggcaaaagctttctgatggacgcttttttcggctgcctcccttaccgccgcaaacgccgcgtccactttcatgcctttatggcagaaatccaccagaggctgaaaaccctgaaaagcgaaagcaacccgttgaaatccgttgccgccgagattgccaaagaaacccgcgtattgtgttttgacgaatttcatgtcagcgatattgcggatgcaatgattttaggccgtctgctggaaaacctgcttaacgagggcgttgttttggtggcgacttcaaactacgcgccttccgaactctacccgcaaggtcaaaaccggagcagttttcttcccacaatcgcgctcatcgagtccagcctgaccgtcttaaacgttgacggcggtgaagactaccgactgcgtaccctccgccccgccgagattttctttacgcctgccaatgaagaaaatgaggcaaaactggcaaaactgttcaaagaaatgacaggcattaccgatttgaaccccggcatcagcaccatccatggtcgggagattccccacaaagccgagtccggccgtgccatatggtttgatttccgcgcactgtgcttcggcccccgctcacagtccgactatctgtatttggccgaacattatgaaatggtttttatttcaggtttggaacaactctcaccgcaagaaaaggcggaggcgcggcggctgacttggctgattgacgtactctacgatttccgggtcaaactgtgtgccaccggcgcggtagatgtcaaccatatctatacggaaggcgattttgccgaagaatttacccgcaccgccagccggatggtcgaaatgcagtccgaagtttatttggaacagccgcacctgaccctatctcccaaggcttcaggcggataa

SEQ ID NO: 67802 - DNA, 516 bp, Neisseria meningitidis; identical to SEQ ID NO: 38690

SEQ ID NO: 67803 - DNA, 1923 bp, Neisseria meningitidis
atgattgaaatcaaaaacctcaccctgcaacgcggtttgaaaatcctgctcgacaaagccaacgccactgtcaatcccggtcagcgcgtcggtttgatcggcaaaaacgggacgggcaaatccagcctgtttgccttactcaagggtgaaatcactcaggacggcggcgatgtctcgattccgaaaaactggcggctcgcttccgtttcccaagaaacgcccgatttggatatttccgctttggattacgttttgcagggcgatgccgagttgcaggcttttcagacggcattgaggcaggcggaagcgcaaaatgacggcatgaagcaggcggaatatcatgctaaattggaagaaatcgacgcttataccgcgccggcccgcgcggcaaaattgttgaacgggctgggtttttcgcaagaagaacacagccgccccgtcaaatccttttccggcggctggcgtatgcgcctgaatcttgcgcaagccctgatttgccgcgccgatttgctcttgcttgacgaaccgaccaaccacttggatttggaaaccgtcttgtggctggaaaaccaccttgcttctttaccctgcacgcaaatcatcatttcccatgaccgcgattttctcaacgcggcaactacccaaaccattgaattatcgcagcaaaaactcacgcaatacggcggcaattacgatttttaccaaaacgaacgtgcgcagcgtctcgcgcaacaacaagctgcctatgtcaaacagcaggcgcaaatcaaacatttgcaatcctttatcgaccgcttcaaagccaaagccaccaaagccgttcaagcgcaaagccgcatgaaggctttggcgaagctcgaacgcatcgctcccgcgcatctggacagcgagttttcctttgagttttaccatcccgaccatctgcccaatcctttgttaaagctagaacacgctgatttgggttacgaaggaaaaaccgttctgcatgacattaccctgtcgctggaaagcggcgcacgctacgggctattgggtgtcaacggcagcggtaaatctacgtttatcaaagccttggcgggcaaaatcgatttgctttccggcagcatcgtccgttccgaaaaactcaatatcggctattttgcccaacaccaactcgataccatccgcgccgaccaaaaccctgtttggcatattcagcagctttctcccgaagtacgcgaacaagaaatccgaaatttcctcggcggcttcaactttgccggcgatatggcgttgcagaaaaccgaacctttttccggcggagaaaaagcccgtctcgcccttgccatgattatttggcaaaagccgaacctgctgctgcttgacgaaccaaccaaccatctggacttggatatgcgccacgccctgacgctcgctctgcaaagtttccaaggcgccttaatcatcgtatcgcacgaccgcagcctgcttgaagcgactaccgacagcttcctcctgatcgacaaaggccgtctgaagaacttcgacggcgatttgaacgattaccgccaatggcgtttggcacaggaaaacgccgccgccgcacccgcagcatccgcacaaagccaaagccgcaaagacaccaagcgcatcgaagcgcaaatccgtcaggaaaaagcccgacgcggcaagccgatacagcagaaaatagaccgtgccgaaaaagaaatggcgcagctttccgaaattcagacggcatgtgaagcatttttagcacaagaagacgcttaccttgaagcaaacaaagaaaaattgcaaaataccttatcccagctggcaaaagtcaaaacacaacttgcccaaatcgaagaggtttggctggcttgtcaagaagaattggaacggattgaaactgaaatcgagaaacagtttgccgagcgataa

SEQ ID NO: 67804 - DNA, 720 bp, Neisseria meningitidis
ttgactttaacccgaaaaacccttttccttctcaccgccgcattcggcacacactcccttcagacggcatccgccgacgcagtggtcaaggcagaaaaactgcacgcctccgccaaccgcagctacaaagtcgccggaaaacgctacacgccgaaaaaccaagtcgccgaattcacgcaaaccggcaacgcctcgtggtacggcggcaggtttcacgggcgcaaaacttccggcggagaacgatacgatatgaacgcctttaccgccgcccacaaaaccctgcccatccccagctatgtgcgcgtaaccaataccaaaaacggcaaaagcgtcatcgtccgcgtcaacgaccgcggccccttccacggcaaccgcatcatcgacgtatccaaagccgccgcgcaaaaattgggctttgtcaaccaagggacggcacacgtcaaaatcgaacaaatcgtcccgggccaatccgcaccggttgccgaaaacaaagacatctttatcgacttgaaatctttcggtacggaacacgaagcacaagcctatctgaaccaagccgcccaaaacttcgccgtttcgtcatcgggtacgaacctctcggttgaaaaacgccgttacgaatacgtcgtcaaaatgggaccgtttgcctcgcaggaacgcgccgccgaagccgaagctcaggcgcgcggtatggttcgggcggtattgactgccggttga

SEQ ID NO: 67805 - DNA, 1002 bp, Neisseria meningitidis
atgaaacggaaaatttggctgctgccgctgctggcggtttcggcatacctgcaggcgcagacggaagtcaggctggcggtgcataagtcgttcagcctgcccaaagggctgattgcgcgtttcgagcgggcaaacgatgcgaaagtgtcgattattcaggcgggcggcgcgaacgaaatgctcaacaaactgattttgagccgcgccaacccgattgccgacgcggtgtatggtttggacaacgccaatatcggcaaggcgcgggaaatgggcattttggcggcggcgcaacccgaatccgcccccgtcgcggtcgggctgccttcggctttggcggtcgattacggctatgtggctatcaattacgacaaaaaatggtttgaaggcaaaaagctgcccctgccgcaaaccctgcaggatttgacccgccccgaatataaaaacctattggtcgtaccgtctcccgccacgtcgtccccggggctgggcttcctgatggcgaacatcagcggtctgggcgaagaaggcgcgttcaaatggtgggcacagatgcggcagaacggcgtgaaggtcgccaaaggctggagcgaggcgtattacaccgacttttcgcacaacggcggcgcgtatccgctggtggtcggttatgccgccagtccggcggcggaagtgtatttttccaaaggcaaatacagcgagccgccgacgggcaacctgtttttaaaaggcggcgtattccgccaggtcgaaggcgcggcagtcttgaagggcgcgaaacagccgaagctggcggcaaaactggtgcaatggctgcaaagtcgggaagtgcagcaggcggttccgtccgaaatgtgggtttaccccgccgtcaaaaacacgcgcctgcccgacgtgttccgcttcgcccaagccccgacgcacaccaccgcccccgcgcagcgcgatattgatgcgaaccagcgcggatgggtttcccgttggattagaacggttttgaaataa

SEQ ID NO: 67806 - DNA, 1257 bp, Neisseria meningitidis
atgaaagtgcttgttttaggtgcgggtgttgccggcgtgtcttccgcgtggtatctggcagaggccggacatgaagtaacggtcatcgaccgcgccgagggtgtggcgatggaaaccagttttgccaatgcaggccagctttcttacggctataccacgccttgggctgcacccggtattccgaccaaagcactgaaatggctgtttaaaagccatccgcctttgctgtttcgccccgacggcagcctgtatcaaatcgaatggctgtggcggatgctgcaaaactgcacggcatcccgctatcaaatcaataaagagcgcatggtcaggatgtccgaatacagccgtgaaatgttccgccgttttgaagcgcaaaccggcatgaattttgagggacgcaaaaaagggacgttgcaggttttccgccaaaccaaagaagtcgaagcggcaaaacaagacattgccgttttggaacgctacggcgtgccgtaccgccgtctgaaacccgaagaatgtgcagaatttgagcctgcgctggcacgcgttaccgccaaaattgccggcggcctgcacctgcctgcagatgcgaccggcgactgccacctcttcactgaaaacctatacaaattgtgtcaggaaaagggcgtacagtttcatttcaaccaaaccatcagccgcatcgaccataacgggctgcgcatcaaagccgttgaaaccgaaacagggcggtttgaagcagatgccgttgtctgtgcgctcggctgcttcagtaggactgtgttggcgcagttagacctcgatctgccgatttatcccgtcaaaggctattccttgaccctgccggtcaccaattcagacggcgcgccggtgtccaccgttttggatgaaagctacaaagtcgctatcacgcgctttgacaacagaatccgcgtcggcggcatggcagaattgtcgggctacgaaatcaaactgcccgaaaaacgccgcgaaaccttggctttggtcgtcaacgatttgttcccggaaggcggcgatttgagccaagcattgttctggagcggcctcagaccgatgacgcccgacagcacgccgttaatcggccgcacccgctttgaaaacttattcttgaatacaggccacggcactttgggctggaccatgtcgctgggttcggcaaaattaaccgccgatatcgtgagcggcaaagacaccgaaatccgaagcgacgatttgagcctgtcgcgctatcaggcttaa

SEQ ID NO: 67807 - DNA, 567 bp, Neisseria meningitidis; identical to SEQ ID NO: 37899

SEQ ID NO: 67808 - DNA, 837 bp, Neisseria meningitidis
atgagtttcgagccaaccgtaatcgaacatttgggtgtaaagatgtattcgcacactgttcctgcgattgccgagttgatagcgaatgcctacgatgcatgtgctacggaagtggaagttaggttattcgataaaccggagcataaaatcgttattaaagataatggtataggaatgagcttcgatgaaatcaatgatttttatttgagaatcggtcggaacaggagaaaagaaaaacaagcctcgtcatgtgaaagaattcccacgggtaaaaaaggccttggtaaattggcattattcgggcttggtaacaaaattgaaatttctactatccagggaaacgaacgggttacttttactttggattatgcggatattctaaaaagtaagggcgtttatcaaccggagtttcggagagagtttgttgagcctaatatcacaagcggaacgaccataactttaaccgaactgacgaaaaagcaaggatatccgttagataattatgtagagcatctttcccgcttgtttgattttccggctcaggattttaaaatcaaagtaagcttgaacggctctgaacccaaaatcattgatggaaatctaaaatatgatcttgttaccccacaattcgaatgggaataccaggatctagcaaccaatatttcatcgttatcttcaaaattcgaacagtatgaatacagcggattaatacaaggtaagttcattacaacggaaaaacctttaaagaataggggcttaggaagcaaaaatattaaattgggttatttcgaagcatcttcattaatattttacctaaatcttcatgccggtggttaa

SEQ ID NO: 67809 - DNA, 1056 bp, Neisseria meningitidis
atgactattttatcggacgttaaagcattaggacaacaaatctggctggacaacctttcccgctcgctggtgcaaagcggcgaattggcgcaaatgctgaaacaaggcgtgtgcggcgtaacctccaatcccgccattttccaaaaagccttcgccggcgacgcgctttatgccgacgaggttgccgccctcaagcagcaaaacctcagccccaaacaacgctacgaaacaatggcggttgccgatgtgcgtgccgcctgcggcatctgtcttgccgaacacgaatccaccggcggcaaaaccggtttcgtcagcctcgaagtttcgcccgaattgtccaaagacgcgcaaggcacggtagaagaagcgcgccgcctctacgccgccatcgggtgcaaaaacgcgatgattaaagtgcctgccaccgacgcaggcatcgatgcgctcgaaaccctcgtttcagacggcatcagcgtaaacctcacgctgctgttctcacgcgcccaaaccctcaaagcctacgccgcctacgcgcgcggcattgccaaacgcttgacagccggacaaagcgttgcccatatccacgtcgtcgccagcttcttcatctcccgtgtggacggcgcgctggacacaacactgcccgaccacctcaaaggcaaaatcgccatcgcccttgccaaagccgcctaccaagactgggcgcaatacttcggcagctcggaatttgccgcactggaagcccaaggcgcaaaccgcgtgcagcttttatgggcatctaccggcgtgaaaaaccctgcctatcccgacacgctctacgttgacagcctgatcggcgcgcacaccgtcaacaccgttcccgatgccacgctcaaagcctttatcgaccacggcacagccaaagccacgctgaccgaaggcgcggacgaagcgcaagcgcagcttgccgaaattgccgcgctcggcatcgatgtcgaaaccttggcggcgcgtttgcaggaagacggtttgaaacaatttgaagaagcctttgaaaaactgctcgcaccgttggtttaa

SEQ ID NO: 67810 - DNA, 843 bp, Neisseria meningitidis
atgattcaacacgcaggcttgggctaccgccgcgacttggcggaagactttctctcgctttccgaaaacagcccgatatgctttatcgaagccgcaccggaaaactggctgaaaatgggcggctgggcgcgcaaacagtttgaccgtgtggcggaacggctgccgctggcgttgcacggattgtctatgtcgctgggcgggcaagcaccgctggatactgatttgatagacggcatcaaagaaatgatgcgccgttacgattgcacgtttttctccgaccatttgagctactgccacgacggcggtcatctttacgatttgttgccgctgcccttcaccgaggaaatggtgcatcatacggcgcggcgtatccgcgaagtgcaagaccgtttgggctgccgcatcgccgtggaaaacacgtcctactatctgcattccccgcttgccgagatgaacgaggtcgagttcctcaacgcggttgcacgtgaggccgattgcggcattcatctggacgtgaacaatatctacgtcaacgccgtcaatcacggcctgttgtcgccggaggcttttttgaaaaacgttgacgcagatcgcgtgtgctatatccatattgccggacatgacgtggaaacgccggaattgttgattgatacacatggcgcggcagttttgccgactgtttgggacttgctcgaacttgcctatgccaagctgccgacgattccgcccaccctgttggaacgcgattttaatttcccgccttttgccgaactcgaagccgaagtcgccaaaatcgccgattatcaaacgcgtgccggaaaggaatgccgccgtgcagcctga

SEQ ID NO: 67811 - DNA, 471 bp, Neisseria meningitidis; identical to SEQ ID NO: 58964

SEQ ID NO: 67812 - DNA, 258 bp, Neisseria meningitidis; identical to SEQ ID NO: 36904

SEQ ID NO: 67813 - DNA, 801 bp, Neisseria meningitidis
atgattgattttgacaaaccggctgaagaagacgccatttatcaaagtcgtttgaaaaaaatcgtttcagacgaccttgtcctctacaacgaaaattcccttaacgtcatgcggaagatattggaaaaatatccaaacggctgttttgatatgattttcgcagacccgccttactttctttccaatgacggcttcagttgtcaaaacggacaaatggtttccgtcaataagggcaactgggataaatccaaaggaatggcggcagatttggaattctacgaagaatggctccgactgtgttacgccttattaaaaccaaacggcacaatttgggtttgcggcacattccataatatttatttaatcggctacctgatgcaaactatcggataccatattttgaacaatattacttgggaaaaacccaatcctccccctaatttgtcctgccgtttttttacccattcgacagaaacaatcttatgggcaaagaaaaataaaaaagccaaacacacgtttcattatgaaatgatgaaagcacaaactgatggcaaacagatgaaatgtgtttggacatttcctcctccaaacaaagccgaaaaaacattcggcaaacatccgacacaaaaaccactccccttgcttgaacgctgcatactctcagcttcaaacatcggagatttaatttttgaccctttcatgggcagcggcacaacaggcgttgccgccttaaaacatggtcggaaattttgtggttgcgaactggaagaagatttttttgaattagcaaaaaaaggttag

SEQ ID NO: 67814 - DNA, 132 bp, Neisseria meningitidis; identical to SEQ ID NO: 39343

SEQ ID NO: 67815 - DNA, 1110 bp, Neisseria meningitidis
atgagcaactggaaacccgatattccctataacgatttaccacccctgccgccaaaacaggatattgaaagcaaaaccatcctgaaacgttgtatagccgcccgtgcatcccttgcccgtttaaagcaggcggcagaactgataccgaatcaagccatgctgattaacacccttcctgttatggaagcccgtgcaagttcggaaattgaaaacatcgtaaccacaacggacaagctgtttcaatccctgcaaatggatacggaacggcaagaccctgccacgaaagaagccctgcaataccgcaccgccctgtttgcaggctatgaatcactgacgagccgccctttatgcacacaaaccgccatcatggtctgcaacgccatcaagcacccctacgaaatggccatccgcaaaacaggcggcacagccctaaaaggaggcaacagcggaaatgttgtctataccccgcccgaaggagaagaaaccatacgcggcaagctggcaaattgggagcggtttattcacgaaagcggcgatttagacccgcttatcatcatggcggcggcacattaccaatttgaagccatccatccgtttacggacggcaacgggcggacggggcgcatattgaacagcctgctattgattgaaaaagggcttttggatttgcctattttgtatttgagccgctacatcatcgaaaacagggcggactattaccgcctgcttttaggcgtaaccgaacggcaggactgggaaagctggataatctacatcttagacggcgtagctgacaccgccgattggacggtatcgaaaatagatgcgatacgccgcctgttcgagcagacacggcaacacatacggacacacgcacaaggaatctacacgcacgaactggtaaatcttctgtttgagcagccatatacacgcattgccaacctagaagcggcagggatagccaaacggcagacggcctctaagtacctgaaagagctttcagacataggtgtgctgcaagaaatcgtcatcggcagggacaaactattcattcatccgcgcctaatggaactattgcggggagagggcaacagctttacttcattctaa

SEQ ID NO: 67816 - DNA, 1149 bp, Neisseria meningitidis
atgcccctccctctcccctctcccgaagcacggcaattctcgctcaaactgcaaaccctcattgccgaaaaaatcggcaaacacggcaactggattccattttcacgttttatggaattggttttatacgctccgcaatacggctactacaccggcggcagccataaaatcggcaataccggggattttattaccgcaccgaccctcacctctctgtttgcacagacactggcacgccaacttcaagaacttctaccccaaacggcgggcaatatctatgaattcggcgcgggaaccggacagcttgccgccgatttgttgggcagcatttcggacggcatcagccgttactatattattgaaatatcgccggagctggcagcacgtcagaaaaacctgattcaagcccgcgcaccggaagcatctcaaaaagttgtccacttgaccgcacttcccgaagcgtttgacggcatcatcatcggcaacgaagtactcgatgccatgcctgtcgaaatcgtccgtaaaaatgaaggcggctcattcgagcatgtcggcgtttgcctagataatgaccgttttacctattcggcacgaccgctgcacgacttacagctatctgccttggcttccctctacttcccaaaaataacttccccctataccagcgaactacatccgcaacaatatgcctttatccgcacccttgcctccagactcgaacacggctgcatgatattcatcgactacggttttgatgcagcgcagtattaccaccctcaacgcaatcaaggtactctgatcggacactaccgacatcacgttatccacaatccttttgacttcatcggattggccgacctgaccgcgcatgtcaactttacagacattgcccaagccgggacggatgccggactggatttgacaggctatctgccccagtcccattttctgctgaatctgggcataaccgaactgttggcacaagtgggaaaaacagactcgcccgcctacatccgtgaagctgctgccgttcagaaactgattgaccagcatgaaatgggcgaactgtttaaagtcatcgcattcggaaaaaatatcggcgtcgactgggcaggattccgcttcggcgacatctgccacaaactctaa

SEQ ID NO: 67817 - DNA, 705 bp, Neisseria meningitidis
atgttgcgttctattttggcggcttccctattggcggtatcttttccgacggcggctgaagcattgaattacaatattgtcgaattttctgaatcggccggtgtcgaggcggttcaggatacaatgtccgcgcgtttccaggtggcggcggaaggacgggacaaaaatgccgtcaatgccgagtttgttaaaaaattcaacagttttaacagaaaatcgaaaaacggcagctttaaaaccgaattggtatcgcgcagtgcgatgccgcgctaccagtacaccaacggcagacgcattcaaacaggctgggaggagcgtgcggaatttaaggtcgaaggtagggattttgatgagttaaaccgttttattgccgatattcaagcagatgccgcattggaatacacggatttccatgtgtcgcgcgaacgccgaaacgaggtcatcgatcaggtcagcaaggatgccgttttgcgtttcaaggcgcgtgccgacaagttgtcgggcatattgggtacgtccggttataaaatcgtcaaattaaatttgggacacatcggcagccatatcgcgggtgggggagctgctcaggcaaaaatgcttcgtgccatgccgatggcggcaagttacggcgtggagggtacggattccgttgcacctggtgtggaggaaatcagcatcagcgtcaatgggacggttcagttctga

SEQ ID NO: 67818 - DNA, 180 bp, Neisseria meningitidis; identical to SEQ ID NO: 64392

SEQ ID NO: 67819 - DNA, 1557 bp, Neisseria meningitidis
atgacattagcagagttttggccgctgtgcctccgccgtcttcacgatatgttgcctcacgggcagtttgcgcaatggattgcgccccttaccgtcggtgaggaggggggcgtatgggtggtgtacggcaagaaccagtttgcctgcaatatgctcaagagccagtttgccggaaaaatagaagcggtgagggaagagttggctgccggccgttccgccttcgtattcaaaccgggagaaggcgtgcgttatgagatggcggcggttgaaggtgctgtcgaacctgccgagccgtccttgcacgcggggtcggaggagatgcctgtgcaggaggttctgttggacgagctgccgtctgaagagcctgtcaaacccgctgcgtcgaaaacggcggcggatattctggcggaacgtatgaaaaacctcccgcatgagccgcgccatactgccgaacctgcttcccgtccggaatcggaggtgcttgcgaaagcgcggacggatgcgcagcgcgatgcggaagaggcacgttacgagcagaccaatctgtcgccggactatacgttcgacacattggtcgaaggcaagggcaaccgccttgcggcggctgcggcgcaggcgattgcggaaagcccggggcagagctacaacccgtttttcctgtacggcagcacgggtttgggcaaaacccacctggtacaggcggtcggcaacgagcttttgaaaaaccgtcccgatgccaaagtgcgctatatgcattcggacgactatatccgcagctttatgaaggcggttcgcaacaatacctatgacgtattcaagcagcaatacaagcaatacgacctgctgattatcgacgatattcagtttattaaaggaaaagaccgtacgatggaagagtttttctatctgtacaaccatttccacaacgagaaaaaacagctgatcctcacttgcgatgttttacccgccaaaatcgaaggcatggacgaccgcctcaaatcccgtttttcatggggactgactttggaactcgagccgcccgaattggaaatgcgcatcgccattttgcagaaaaaggcggaagcggcgggcatcagtattgaagacgaagccgcgctgttcattgccaatctgatccgttccaacgtgcgcgagcttgaaggcgcgtttaaccgtgtcggagcgagcagccgctttatgaaccgtcccgtcatcgacatcgatttggcgcgtaccgctttgcaggacattattgccgagaagcataaggtcattaccgccgatatcattattgatgccgttgccaaatattaccgcatcaaaatcagcgacgtactcggcaaaaaacgcacgcgcaacattgcccgtccgcgccaggtggcgatgagcctgaccaaagaactgaccactttgagcctgccgtctatcggcgattcgtttggcgggcgcgatcatacgaccgttatgcacggcatcagggcagtggcgaaactgcgcgaagaagatccggaattggctcaggattatgaaaagctgctgattctgattcaaaactga

SEQ ID NO: 67820 - DNA, 1245 bp, Neisseria meningitidis; identical to SEQ ID NO: 43719

SEQ ID NO: 67821 - DNA, 2007 bp, Neisseria meningitidis
atggctgatatgaagaaaattacccctcaaaacctgcgccccctgctttcggaaagcttgggacataccgattttgtcaacgtcctcaacgcactgattaaatttttgcgccgtggcggcaaaaaatgtgcgggggaacgtttcgacctgattatcgacacattcaaacaagacagggaattactgtcccgcttcagccggtgtttttacatctggctcgcgcaggtgcacatttatccggcactcatcaaactcggcatcttctcgcgccacagctttgcccgggaaatgggcatacgcatatacgaacgcttcagcccgtcatataaagattttgccaacttgggcgaagtcttcctttatcttttccattccgaaaacgacgacaaatggctgcaaacgctcaatatccgccaatggctggttttatacgaactcatccgaagccacgccgaaccgtccaaattgcagacggcgggcatccgccttgccgatgcgcgtttgcgcgccatcgaaatgctgtctgtctggacggcatccgaagccatcgaacccgacctcatccgcatcgccccgcgcctgctggaagccgattcttccttcgtcgccctccagcgcgaaaccgccaaactggtcgaacactaccgcaacagcactgcgccttacgacaccgcccacctcgaggtgatgttcgaccaatgtttcagccagattgactatttgcgccgcaaagggacgggcgccggctccggttcgtcggtcaaagtcgcccacctgctcgaacggctccggcagaccgtagaccgtctgaagctgctcaccgacatccaaaccggcgccggcaacagcaaccgcctgaccatcgcgctgatgaactccctcatctacgcggcggtcgaacaatacagcacccgccacctgcgccgcagcagcatccgtatgctcgcccgcagcattaccgaaaacaaaagccaccacggcgaacactacatcacccgcaaccgcaaagaatatttcaaaatgttctactcggcggcaggcggcggcgtcatcatcgccctgatggcgctgctcaaaatccgcatcggcacactcggcctcagccccttcctcacttccttgtcggccgggttcaactacggcatcggctttatgatcatccatatgctgcactgcaccgtcgccaccaagcagcccgcgatgactgccgccagctttgccgaacaggtcgatctcaacgaaggcggcaaagcggtggacaacaagctcgccaagctcctcatcgacgtatgccgctcccaaagtgtcgccgtcttcggcaacgtttccatcgccatccttttggcgtgcgccatatcgttcggctatgcccatctgtaccggcagcccatactcgatgcccacaccgccgcctaccagttcaaatccatagacatcatcgcttacccgacgctgtggtatgccgccattgcaggtctgtggctgttctgctccggcatcatcgcaggttttttcgacaaccgcgccgactacctcaacctgcgccaacgcctgcctttcaaccccttgctgcgtaaaatcatgcgccccgggccccgccgcgtcctcgccgcctacatccacaaacactacggctcgttggtaggcaacttcatcttcgggatgctcttgggtatgaccggctatttcggacacctcctcgggctgccgctggacatccgccacgtcgccttttcctccgccaacctcggctatgccgccgtcagcggcaacgtcggtttgggcacgttcgtactcggcattttcagcgtcctcgccatcggcctggtcaacctctgcgtcagtttcagcctcgccctcttcgtcgccctgcgctcgcgcggcacgaaaatcggcagcatccgcaatctgattaaaagtttttggaatcagattaaaagcaatccctgcatacttttcctcccgcccgccaaagaacagggacatcctccttcggacaagccttga

SEQ ID NO: 67822 - DNA, 2703 bp, Neisseria meningitidis
atgcaactgcatattctgaacaatccgaaggacgcggctttggcggcggacgcggaatttttgaaacagtccctgttcaacctcctgcacgaagaagcctcgccgttggttgtcgaaacggtcaaactcttgtccacttccgacgacagcgcggcattgattgaaaaagtattgccgcaattggacgaacaacaaacccacgatttaaccttggcctgcggcctgttcgcccagattttgaacatcgccgaagacgtgcaccacgaacgccgccgccaaatccacgaagaagccggacgcggcggcgcggaaggcagcctgacggaaaccgtccgcaggctcaaagcggggaaagccgacggcaaatcggtgcagcggcagttggacaatacgtccgttaccgccgttttgaccgcgcacccgaccgaagtgcaacgccaaaccgtcttaagcttcaaccgccgcatccgcgcactgttgccgcaacgcgaacgctgcaccaatgccgacgcgctggcacggctgcgccgcgaaatcgacactatcctgctgggcttgtggcagaccagcgaaacgcgccgccacaaactcagcgtcaacgacgaaatcaacaacggcgtgtccatcttcccgatgagctttttcgaagccctgcccaagctctaccgcaatatggaacacgactttcagatggtctatcccgatgtctgcgttccgaatatcctcaaaatcggcggctggattggcggcgaccgcgacggcaatccgttcgtttctgccgaaaccttgcgttttgccttccgccgccacgccgatgccgtgttccgtttttaccgtggcgaactcgacaaactttaccgcgaactgccgctctccatccgccgcgtcaaagtcaacgacgacgtaatggcactggcagccctctcgcctgacgaagaacttgcccgcacggaagaaccctaccgccgcgccattgcctacattatggcgcgcgctatgggcaaagcgcgcgcgctcggtttgggcatgggctgcaaattcggctttctcgagccgtatgcttcggcacaagaatttctcgatgatttgaaaaaattgcaacgttcccttatcgacaacggcagccgcctgcttgctgaaggccgtttggcagacctcatccgttccgtgtccgtgttcggcttccacatgatgccgctcgacctgcgccaacacgcaggcaaacacgccgatgtggttgccgagcttttccaacacgcaggcttggaagactacaacagcctgaacgaagagcaaaaacaagccgccctgttgcgcgaattgagccatcaacgtccgctgtacagcccgttcatcacatacagcgaccatacccgccacgaactggcaattttcaacgaagcgcgcaaaatcaaagacgaattcggcgaagatgccgttacacaaagcattatttccaactgcgaacaacccagcgacctgctcgccttggcattgctgctgaaagaaagcggcctgctggcggtggaaaacggcaaaccgcgcagccgcatcaatatcgtgccgctgtttgaaaccatcgaagcactcgaaaacgcctgtccggtcatggaaaccatgttccgcctcgattggtacgatgccctgctcgaaagccgcggcaacatccaagaaattatgctcggctactccgactccaacaaagacggcggctatgttaccagctcatggtgtctgtatcaggcggaattgggcttggtcgaactcttcaaaaaatacgatgtccgcatgcgcctgttccacggtcgcggcggcagcgtcggacgcggcggcggtccgtcttaccaagccattctcgcccaaccggcgggcagcgttgccggacaaatccgcattaccgaacaaggcgaagtcattaccgccaaatacgccgaccccggcaatgcccaacgcaacttggaaaccttggttgccgcgactttggaagccggcatcctgccggataaaaaagaccctgatgccaaactgatgcaggcattgtcggacgtatcgttcaaatactaccgcgaactgattacccaccccgacttcatcgactacttcctgcaaaccagcccgattcaggaaatcgccaccctcaacctcggcagccgtcccgccagccgcaaaaccttggcgcggattcaggacttgcgcgcgattccgtgggtattttcctggatgcaaaaccgcctcatgctgccggcttggtacggtttcggcagcgcggtggaaaccttgtgcgaaggcaatcccgaaaccctcgccgccctgcgcgaacacgcccaaagcaacccgttcttccaagccatgctctctaatatggaacaagtgatggcgaaaaccgacatcaccctcgcggaaaactatgccggcttgagcgaatcgcccgaaaaggcaaaagtcatcttcggcatgatcaaggaagaataccaacgcagccgcaaagccctgctcgacctgctgcaaaccgaagaacttttacgcgacaaccgcagcctcgcccgttcgctcgctttgaggattccctacctgaacgcgctcaacggtttgcaagtcgccatgctcaaacgcctgcgtaaagaacccgacaatccgcacgccctgctgatggtgcacctgaccataaacggcgtggcccaaggtttgcgcaatacaggctga

SEQ ID NO: 67823 - DNA, 1041 bp, Neisseria meningitidis
atgcaacccatccgataccgaaccgaccttaccccctacaacactttcggcctgcgcgcccaagcccgagcctttattgcgcttgaacacgccgacgggttgcgcgacatcgtccggctacccgagttcaaccgagatactgttttatggctgggcggcggcagcaatatccttttgatggaggactacgccggtctggtcgtacatatggaaaacaaaggcatacgcgaaattgctcgttcagacggcatggttctgattgaagcgcaggcgggcgaaatctggcacgattttgtcctgcacgccgtcgcgctgggtttgaacggtttggaaaacctgagcctgattccgggtacggtcggcgcgtcgcccgtgcagaacatcggcgcatacggcgtagaggcgaaagatgtgattcacagcgtgcgctgcttcgatttggatacggaaacctttgtaaccctttccaatgccgactgccgcttcgcctaccgcgaaagcctgttcaagcaggaaggtaaagggcgttatgtgattgtttcggtcgtatttgcattaaaaacgcattttgtgccgaacttgggttacggcgatttggcggccgccgttgccgaactgagcgcgggcagggtgccgacggcgaaagatgtttccgatgcagtgtgtgcaatccgcaacagtaaacttcctaatcctaacgtgcttggcaatgtcggcagtttctttaaaaaccccgtcgtcagcgcagaaaaagccgccaccttgttgcagcggcatcctgatatgccgcgctatccgcagcccgacggttcggtcaaactcgccgccggctggctgatcgaccaatgtcgtctgaaaggctttcaaatcggcggcgcggcggtacatgacaggcaggctttggtcttagtgaacaaaaacaatgcctcggcaaacgatgtccggcaattggcgcaacacatcaaatttacagtatttgctcggtttcaggtagaattgcacgccgaacccaattggctgcctgcttcgttcagcctgtaa

SEQ ID NO: 67824 - DNA, 204 bp, Neisseria meningitidis; identical to SEQ ID NO: 40161

SEQ ID NO: 67825 - DNA, 309 bp, Neisseria meningitidis; identical to SEQ ID NO: 36432

SEQ ID NO: 67826 - DNA, 276 bp, Neisseria meningitidis
atgaaaccgaatattcatcctgacaattatcgaaccgtcctttttttcgacagcagcgccaatgaaggctggttaatccgctcctgtgccgaaacacacggaaaaacgatggtttggacagacggcaaagaatatccgctgttttcgctggatacttcttccgcatcccatcccgtctataccggcaagcagcgcaacgtcaacaccgaaggccgtgccagcaaattcaaccaacgtttccaatccgtcatgtcatcgtttagaaaggacaaataa

SEQ ID NO: 67827 - DNA, 1929 bp, Neisseria meningitidis
ttgatcgaatgtaaaaacatcaaccgctatttcggcagcggcgagaaccgcgtccatattttgaaagacatcagcctgtcgatagagaagggcgattttgtcgccatcatcgggcagtccggttcgggcaagtccacgctgatgaacatactcggctgtttggataccgctggttccggttcgtaccgaatcgacggcatcgaaactgccaaaatgcagcctgacgaactggcggcattgcgccgcgaacgcttcggtttcatcttccaacgctacaacctcttaagctcgctgaccgcaagggataacgtcgcgctgccggccgtctatatgggcgcgggcggcaaagagcgttccgcgcgggcggacaaactcttgcaggatttgggtttggcaagcaaagagggcaacaagcccggcgaactctcgggcggacagcagcagcgcgtctccatcgcccgcgccctgatgaacggcggagaaatcatctttgccgacgagccgaccggcgcactcgataccgccagcggcaaaaacgtgatggaaatcatccgcaggctgcacgaagccgggcataccgtcattatggtcacgcacgaccccggcatcgccgccaatgccaaccgcgtcatcgaaatccgggacggcgaaatcatttccgacacctcgaaaaatcccgaaatccccgcaagcaatgtcgggaggattcgggaaaaagcctcgtggtcgttttattacgaccagtttgtcgaagccttcagaatgtcggtgcaagcagtattggcgcacaaaatgcgttcgcttctgacgatgctcggcatcatcatcggcatcgcgtcggtggtttccgtcgtcgcattgggcaacggttcgcagaaaaaaatccttgaagacatcagttcgatagggacgaacaccatcagcatcttcccggggcgcggcttcggcgacaggcgcagcggcaggattaaaaccctgaccatagacgacgcaaaaatcatcgccaaacaaagctacgttgcttccgccacgcccatgacttcgagcggcggcacgctgacttaccgcaataccgacctgaccgcttctttgtacggcgtgggcgaacaatatttcgacgtgcgcggactgaagctggaaacggggcggctgtttgacgaaaacgatgtgaaagaagacgcgcaggtcgtcgtcatcgaccaaaatgtcaaagacaaactctttgcggactcggatccgttgggtaaaaccattttgttcaggaaacgccccttgaccgtcatcggcgtgatgaaaaaagacgaaaacgctttcggcaattccgacgtgctgatgctttggtcgccctatacgacggtgatgcaccaaatcacaggcgagagccacaccaactccatcaccgtcaaaatcaaagacaatgccaatacccaggttgccgaaaaagggttgaccgatctgctcaaagcgcggcacggcacggaagatttcttcatgaacaacagcgacagcatcaggcagatagtcgaaagcaccaccggtacgatgaagctgctgatttcctccatcgccctgatttcattggtagtcggcggcatcggcgtgatgaacatcatgctggtgtccgttaccgagcgcaccaaagaaatcggcatacggatggcaatcggcgcgcggcgcggcaatattttgcagcagtttttgattgaggcggtgttaatctgcgtcatcggcggtttggtcggcgtgggtttgtccgccgccgtcagcctcgtgttcaatcattttgtaaccgacttcccgatggacatttccgccatgtccgtcatcggcgcggtcgcctgttcgaccggaatcggcatcgcgttcggctttatgcctgccaataaagcagccaaactcaatccgatagacacattggcacaggattga

SEQ ID NO: 67828 - DNA, 1398 bp, Neisseria meningitidis
atgagccaaggcaaaatcgtacaaattatcggtgcggttgttgacgtggaatttccacgcgacatgattccgcgcgtttacgacgctttgaaattagacgaaaacggtctgactttggaagtccaacagcttttgggcgacggcgtagtccgtaccattgcgatgggcagctcggacggtttgaaacgcggcatgactgtgagcaataccggtgcgcccattactgtgccggtaggtaaaggtacattgggtcgtattgtcgacgtattgggtacgcctgttgacgaggcaggtccgatcgataccgacaagagtcgtgccatccaccaagccgctcctaagtttgacgaactgtcttccacaaccgaattgctcgaaacgggcattaaagtgattgacttgctgtgtccgtttgccaaaggcggtaaagtaggtctgttcggcggtgccggtgtgggtaaaaccgtgaacatgatggaattgatcaacaacatcgccaaagcgcacagcggcttgtccgtgttcgcaggcgtgggtgagcgtacccgcgaaggtaacgacttctaccacgagatgaaagattccaacgtattggataaagtggcaatggtttacggtcagatgaacgaacctccgggcaaccgtttgcgcgtcgcattgaccggtttgaccatggcggaatacttccgtgacgaaaaagacgaaaacggcaaaggccgcgacgtattgttcttcgtggacaacatctaccgttacactctagctggtaccgaagtatccgcattgttgggccgtatgccgtctgcagtgggctaccaaccgacattggcagaagaaatgggtcgtttgcaggagcgtattacctctacccaaaccggttctattacttctatccaagccgtatatgtacctgcggacgacttgaccgacccgtctccggcaacaacgttcgcccacttggacgcaaccgtcgtattgagccgcgatattgcctctttgggtatttacccggcagtcgatccgcttgattccacttcgcgccaactggatccgatggtcttgggtcaagagcactacgacgtggcgcgcggcgtacagtccaccctgcagaaatacaaagaattgcgcgacatcatcgccatcttgggtatggacgaattgtctgacgaagacaaactgaccgtaatgcgtgcgcgtaaaatccaacgcttcctgtcccaaccgttccacgttgccgaagtgtttacaggttctccgggtaaatatgtcgccctgcgcgataccattgccggcttcaaagccatcttgaacggcgaatacgatcatctgcccgagcaggcattctatatggtcggcagcattgaagaagcggttgagaaagcgaaaaccttaaactga

SEQ ID NO: 67829 - DNA, 642 bp, Neisseria meningitidis
atgaaactgtatatttacgaccattgcccgttttgtgtgcgtgcgcggatggctgccgggctgtttggcgcggacgttgaagaagccgtgctggcaaacgacgacgaggcaacgccgattggtatgatcggtgcgaaacaagtgcccgtcctgcaaaaagaagacggttcgtttatgggcgagagtttggacattgtgcggcatttcgaccgcgaagaccgtctgaaagacgaagtccgccccgagatacgggcgtggctggacaaggtgggcggatacaacgacaaactggtgcagccgcgcgtgatcaaaatcgggctgcccgaatttgcaacgccggaagcggtgaaatattttacagacaaaaaagagaaaagcatcggcagcttttccgccaatttgaataaaaccgcccaatacctcgaacggataaacgcagatttgcaagagttggagaatttgatggacggtgcttcagacggcatcaacggcggaatcggtatggaggatattttggttttccccgttttgaggaatctgaccgtggtgcgcggcatcgaatggccccaaaaggtgatgggttatttgatgacgatgagtgaaaaatcgggcgtgccgctttattttgacagggcattgtaa

SEQ ID NO: 67830 - DNA, 1047 bp, Neisseria meningitidis
atgccgtctgaagccttcagacggcatcgtgcctatcgggagaataaattgcagtctttagtcagcgtattgatttgcgcctacaacgtagaaaaatatttcgcccaatcattagccgccgtcgtgaatcagacttggcgcaacttggagattttgattgtcgatgacggctcgacagacggtacgcttgccattgccaaggattttcaaaagcgggacagccgtatcaaaatccttgcacaagctcaaaattccggcctgattccctctttaaacatcgggctggacgaattggcaaagtcaggaatgggggaatatattgcacgcaccgatgccgacgatattgccgcccccgactggattgagaaaatcgtgggcgagatggaaaaagaccgcagcatcatcgcgatgggcgcgtggctggaagttttgtcggaagaaaaggacggcaaccggctggcgcggcatcacaggcacggcaaaatttggaaaaagccgacccgacacgaagatattgccgactttttccctttcggcaaccccatacacaacaacacgatgattatgaggcgcagcgtcattgacggcggtttgcgttacaacaccgagcgggattgggcggaagattaccaattttggtacgatgtcagcaaattgggcaggctggcttattatcccgaagccttggtcaaataccgccttcacgccaatcaggtttcatccaaatacagcatccgccaacacgaaatcgcgcaaggcatccaaaaaaccgccagaaacgattttttgcagtctatgggttttaaaacccggttcgacagccttgaataccgccaaataaaagcagtagcgtatgaattgctggagaaacatttgccggaagaagattttgaacgcgcccgccggtttttgtaccaatgcttcaaacggacggacacgccgcccgccggcgcgtggctggattttgcggcagacggcaggatgcggcggctgtttaccttgaggcaatacttcggcattttgcgccgattgctgaaaaaccgttga

SEQ ID NO: 67831 - DNA, 528 bp, Neisseria meningitidis
atgaaacagaaaatctggtacacctacgatgacatccaccgcgtcatcaaagcattggcagaaaaaatccggaacgccggcatcaaatacgatgccatgatcgctatcggcggcggcggctttattccggcacgtatgctgcgctgttttctggaaattccgatttatgccgtaaccaccgcctattacgacagcgacaacgaaggacaggttacagaagaagtcaaaaaagtccaatggctagaccccgttcccgaagccctgcgtggcaaaaacgtgctcgtcgtcgatgaagtggacgacagccgcgttaccatggaattttgcctgacagagctgctcaaagaagacttcggcaccatcggcgtcgccgtactgcacgaaaaaatcaaagccaaagcaggtaaaatccccgaaggcattccctatttcagcggcatcaccgtagacgactggtggattaactatccgtgggacgcactcgacatcgacgaacacaaccgccttgccgaggccggccgaggctga

SEQ ID NO: 67832 - DNA, 810 bp, Neisseria meningitidis
atggcggaaatcggggatttcgccgtcaaatctatgatagggatacggagcaaacgaatgattaccctgccttccttaaacaatctgccgtcaaaatgggatgaaatccgccattgcctcgaaacccgggtttttgagtgcggcgttatgccgcatcccaatctgacggaatgcgaagccgggcagttcgatcgggatttttgggacaatatcggctgcgcgcctgaagaatatgtccgcatccgccgcgccatccgtttgttggaagcgcgttatcctgacagtttgaacgagctggtgtgtgccgccattgccacgcctttgggcgagatgctggcggtgtttggaaataagggattgtgtctgctggagtttgtcggacagaagcatttggaacaggaaattgccgccgtccaaaaagccttgcgcggacggtttgtgtttcgggaggatgagcggacgcaacttttgcggcaggaattggacttatacttcaagggtcgtctgaaaacctttgccacgcctttggagcagattggcaccgagtttcaaaagcaggcatgggacgcactcttggcgattccttacggtgaaacgcgcagctacaaggaacaggcgcagcatttgggcaaccccaaagccgtccgcgccgttgccgccgccaacgggcagaacaaagtatctatcctgattccctgccaccgcgtcatcggcagcgacggcaaactgaccggctacgcaggcggtttgaaccgcaaacagtttttactggctttggaacgcggcgaagttcagacggcattgttttaa

SEQ ID NO: 67833 - DNA, 1260 bp, Neisseria meningitidis
atgagtatggcacttgcccaaaaacttgccgccgacagcattgcggcggttgccgaaggacacaaccttcaggacgtgttggtgcacatccgcgcggcgcatcccgaccttacggcacaggaaaacggcgcgttgcaggacatcgcctacggctgccagcgttatttgggcagtttgaaacatatgctcgcgcagatgctgaaaaagccgattgacaacccgcagctcgaaagcctgcttttggcggcgttgtaccaactgcattacacgcgcaacgcgccgcacgccgtggtcaacgaagcggtggaaagcatagccaaaatcggacgcgggcagtaccgttcgtttgccaacgcgattttgcgccgctttttgcgcgaacgcgacaagcttgcggcttcctgtaaaaaagacgatgtggcgaaacacaacctgccgctgtggtgggtggcttacctgaaaaaccattatccgaaacactggcacaacatcaccgccgcgctacaatcccatccgccgatgacgttgcgcgtcaaccgccgacacggcaatgccgaaagctatttggaaaaactggctgcggaaggtattccggccagggcgttggacgaatatgcggttacgttggaagaagccgtgccggtaaaccgtctgcccggtttttcagacggcattgtttcggtacaggacttcggtgcgcagcaggcggcgtatttgttaaacccgaaagacggagaacggattttggacgcgtgcgccgcgccgggcggcaagacggggcatattttggaactggcggattgccgcgttaccgccttggacatcgatgcaggccgtctgaagcgtgtggaggacaatatcgcccgtttgggctttcagacggcatcggcggcgtgtgccgatgcgcgggatttggcggcgtggtatgatggaaagcctttcgacgcaatccttgccgacgtgccatgcaccgcttccggcgtggcgcggcgcaatcccgacgtgaaatggctgcgccgtccgaccgacgcgctcaaaaccgcccgccagcaggaagccctgctggacgcactttggcagacgctgaaacagggcggcagaatgctgcttgccacctgttccgtgttcgtcgaagaaaacgacgggcaattgcaaaaattcctcaaccgccatgccgatgccgaaccgatcgaatcgcgggtgcttttaccgaacaaacaccaagatggcttttattacgcgcttattcaaaagcattaa

SEQ ID NO: 67834 - DNA, 564 bp, Neisseria meningitidis; identical to SEQ ID NO: 38408

SEQ ID NO: 67835 - DNA, 591 bp, Neisseria meningitidis
atgaaaaaatcctccctcatcagcgcattgggcatcggtattttgagcatcggcatggcatttgccgcccctgccgacgcggtaagccaaatccgtcaaaacgccactcaagtattgagcatcttaaaaaacggcgatgccaacaccgcccgccaaaaagccgaagcctatgcgattccctatttcgatttccaacgtatgaccgcattggcggtcggcaacccttggcgcaccgcgtccgacacgcaaaaacaagcgttggccaaagaatttcaaaccctgctgatccgcacctattccggcacgatgctgaaattaaaaaacgccaacgtcaacgtcaaagacaatcccatcgtcaataaaggcggcaaagaaatcatcgtccgcgccgaagtcggcgtacccgggcaaaaacccgtcaacatggacttcaccacctaccaaagcggcggtaaataccgtacctacaacgtcgccatcgaaggcgcgagcctggttaccgtgtaccgcaaccaattcggcgaaattatcaaagcgaaaggcgtggacggactgattgccgagttgaaagccaaaaacggcggcaaataa

SEQ ID NO: 67836 - DNA, 996 bp, Neisseria meningitidis; identical to SEQ ID NO: 61262

SEQ ID NO: 67837 - DNA, 168 bp, Neisseria meningitidis; identical to SEQ ID NO: 39391

SEQ ID NO: 67838 - DNA, 717 bp, Neisseria meningitidis
ttgttaatccactatactttatgccgttaccgcaactggctggcgcaagacgacaccctgtccgaactgctcaaactgattaactgccaactgaccgaaaaaggtttaaaaatagagaaagcatccgccgctgttgttgatgccaccattattcagactgccggcagcaaacagcgtcaggccatagaagttgacgaagaaggacaaatcagcggccaaaccacaccgagtaaggacagcgatgcccgttggataaagaaaaacggcctctacaaactcggttacaaacaacatacccgtaccgatgcggaaggctatatcgagaaactgcacattacccccgccaatgcccatgagtgcaaacacctgtcgccgttgttggaaggtctgcccaaaggtacgaccgtctatgccgataaaggctacgacagtgcggaaaaccggcaacatctgaaagaacatcagttaccggacggcattatgcgcaaagcctgccgcaaccgtccgctgacggaggcgcaaaccaaacgcaaccgatatttgtcgaagacccgttatgtggttgaacagagcttcggtacgctgcaccgtaaattccgctatgcgcgggcagcctatttcggactgattaaagtgagtgcacaaagccatctgaaggcgatgtgtttgaacctgttgaaagccgccaacaggttaagtgcgcccgctgccgcctaa

SEQ ID NO: 67839 - DNA, 993 bp, Neisseria meningitidis
atgcaatccgccggtattcaggttttagcagggatagattacgaacccagctgcaaagaaacatatgaagccaatataaatgccaaatttatacaggctgatgtttttgaattgcagcctgaaaccttggaaaaagaactcggcttaaaaaagaatgatgatgatttgattcttataggttgtagtccttgtcaatattggagtgttattcaaacagacaaaagaaaatcggaaaaatccaagagtttgcttttggagtttcagcggtttgtagaatatttcaatcccggatatgttgttgtagagaacgtaccgggaattctgagcaggatgaaagaaagcgggcttgataatttcataaaattattagaagaaaaaggatttaccgtccatttcggtattcacaatacggctgattacggaattccccaaagtcgtaagaggtttactttgattgcaaacagaataaccgaagagaagctggaaccagccaagtattcgggcaaacggcttacggtacgcgatgttttaggaatggaaaatggctttcccaaaattattgcaggacaccaagacgaaacggattttatgcatagctgtgcgggattatctgatatcaacttgaaacgattggctttgatacctaaaaacggaggaaaccgtttggcttttgcgcatattcccgaattacagctggaatgttttatcggaaaagacaatagttttaaagacacgtttggtaggctatggtgggataagcccgcacctaccataacgaccaaattctttagtatttccaacgggaggtttgcccatcctgaagaagatagggcgttatcactgcgcgaaggtgcaacattgcaatcgttccctcgtaactatgtctttaaagcgggcagcagggacaagatagcccgtttgattggtaatgccgttcctccgatgtatgcggaaaaaataggcagggcaattgttgataatatcgaatgttag

SEQ ID NO: 67840 - DNA, 957 bp, Neisseria meningitidis; identical to SEQ ID NO: 39193

SEQ ID NO: 67841 - DNA, 624 bp, Neisseria meningitidis
atgaaaaaaccgaccgataccctacccgttaatctgcaacgccgccgcctgttgtgtgccgccggtgcgttgttgctcagtcctctggcgcacgccggcgcgcaacgtgaggaaacgcttgccgacgatgtggcttccgtgatgaggagttctgtcggcagcgtcaatccgccgaggctggtgtttgacaattcgaaagagggcgaacgttggttgtctgccatgtcggcacgtttggcaaggttcgtccccgaggaggaggagcggcgcaggctgctggtcaatatccagtacgaaagcagccgggccggtttggatacgcagattgtgttggggctgattgaggtggaaagcgcgttccgccagtatgcaatcagcggtgtcggcgcgcgcggcctgatgcaggttatgccgttttggaaaaactacatcggcaaaccggcgcacaacctgttcgacatccgcaccaacctgcgttacggctgtaccatcctgcgccattaccggaatcttgaaaaaggcaacatcgtccgcgcgcttgcccgctttaacggcagcttgggcagcaataaatatccgaacgccgttttgggcgcgtggcgcaaccgctggcagtggcgttga

SEQ ID NO: 67842 - DNA, 717 bp, Neisseria meningitidis
  misc_feature 698, 699, 700, 701, 702: 'n' is a, c, g or t
atgagctacacgcaactgacccagggcgaacgataccacatccaatacctgtcccgccactgcaccgtcaccgaaatcgccaaacagctgaaccgccacaaaagcaccatcagccgcgaaatcagacggcaccgcacccaagggcagcaatacagcgccgaaaaagcccagcggcaaagccagactatcaaacagcgtaagcgacaaccctataagctcgattcgcagctgattcagcacatcgacacccttatccgccgcaaactcagtcccgaacaagtatgcgcctacctgtgcaaacaccaccagatcacgctccaccacagcaccatttaccgctaccttcgccaagacaaaagcaacggcagcacgttgtggcaacatctcagaatatgcagcaaaccctaccgcaaacgctacggcagcacatggaccagaggcaaagtacccaaccgtgtcggcatagaaaaccgacccgctatcgtcgaccagaaatcccgtatcggcgattgggaagccgacaccattgtcggcaaaggacagaaaagcgcattattgaccttggtcgaacgcgttacccgctacaccatcatctgcaaattggatagcctcaaagccgaagacactgcccgggcagctgttagggcattaaaggcacataaagacagggtgcacaccattaccatggataacgggannnnncacacacttaattaa

SEQ ID NO: 67843 - DNA, 348 bp, Neisseria meningitidis; identical to SEQ ID NO: 58991

SEQ ID NO: 67844 - DNA, 2214 bp, Neisseria meningitidis
atgaaaaccccactcctcaagcctctgctcattacctcgcttcccgttttcgccagtgtttttaccgccgcctccatcgtctggcagctaggcgaacccaagctcgccatgcccttcgtactcggcatcatcgccggcggccttgtcgatttggacaaccgcctgaccggacggctgaaaaacatcatcgccaccgtcgccctgtttaccctctcctcgctcacggcacaaagcaccctcggcacagggctgcccttcatcctcgccatgaccctgatgaccttcggcttcaccattttaggcgcggtcgggctgaaataccgcaccttcgccttcggcgcactcgccgtcgccacctacaccacacttacctacacccccgaaacctactggctgaccaaccccttcatgattttatgcggcaccgtactgtacagcaccgccatcctcctgttccaaatcgtcctgccccaccgccccgtccaagaaagcgtcgccaacgcctacgacgcactcggcggctacctcgaagccaaagccgacttcttcgaccccgatgaggcagcctggataggcaaccgccacatcgacctcgccatgagcaacaccggcgtcatcaccgccttcaaccaatgccgttccgccctgttttaccgtttgcgcggcaaacaccgccacccgcgcaccgccaaaatgctgcgctactacttcgccgcccaagacatccacgaacgcatcagctccgcccacgtcgactaccaagagatgtccgaaaaattcaaaaacaccgacatcatcttccgcatccaccgcctgctcgaaatgcagggacaagcctgccgcaacaccgcccaagccctgcgcgcaagcaaagactacgtttacagcaaacgcctcggccgcgccatcgaaggctgccgccaatcgctgcgcctcctttcagacagcaacgacaatcccgacatccgccacctgcgccgccttctcgacaacctcggcagcgtcgaccagcagttccgccaactccagcacaacggcctgcaggcagaaaacgaccgcatgggcgacacccgcatcgccgccctcgaaaccggcagcctcaaaaacacctggcaggcaatccgtccgcagctaaacctcgaatcaggcgtattccgccatgccgtccgcctgtcccttgtcgttgccgccgcctgcaccatcgtcgaagccctcaacctcaacctcggctactggatactactgaccgcccttttcgtctgccaacccaactacaccgccaccaaaagccgcgtccgccagcgcatcgccggcaccgtactcggcgtaatcgtcggctcgctcgtcccctactttaccccctccgtcgaaaccaaactctggatcgtcatcgccagtaccaccctctttttcatgacccgcacctacaaatacagcttctcgacatttttcatcaccattcaagccctgaccagcctctccctcgcagggttggacgtatacgccgccatgcccgtacgcatcatcgacaccattatcggcgcatcccttgcctgggcggcagtcagctacctgtggccagactggaaatacctcacgctcgaacgcaccgccgcccttgccgtatgcagcaacggcgcctatctcgaaaaaatcaccgaacgtcctcaaaagcggcgaaaccggcgacgacgtcgaataccgcgccacccgccgccgcgcccacgaacacaccgccgccctcagcagcaccctttccgacatgagcagcgaacccgcaaaattcgccgacagcctgcaacccggctttaccctgctcaaaaccggctacgccctgaccggctacatctccgccctcggcgcataccgcagcgaaatgcacgaagaatgcagccccgactttaccgcacagttccacctcgccgccgaacacaccgcccacatcttccaacacctgcccgaaaccgaacccgacgactttcagacagcactggatacactgcgcggcgaactcgacaccctccgcacccacagcagcggaacacaaagccacatcctcctccaacagctccaactcatcgcccggcagctcgaaccctactaccgcgcctaccgccaaattccgcacaggcagccccaaaacgcagcctgaaaaagtttcggcattttgtaagagagagcagattgtcagacaggttgcaagatagtggataa

SEQ ID NO: 67845 - DNA, 324 bp, Neisseria meningitidis; identical to SEQ ID NO: 45848

SEQ ID NO: 67846 - DNA, 369 bp, Neisseria meningitidis; identical to SEQ ID NO: 38555

SEQ ID NO: 67847 - DNA, 1032 bp, Neisseria meningitidis
atgctgcaaaccgacaacctgaccgccgcgcaaccgcaacgcatcgttgccgcccaaaccgcctccgcacaggaagaactgctcgaacgcgccctccgccccaaaacgctggacgactacatcgggcaagacaaagccaaagaacagcttgccattttcatccaagccgccaaaaaacgcggcgaagcactcgaccacgttttgctcttcggcccgcccggactgggcaaaaccacactggcgcacatcatcgccaaagaattgggcgtaaatttgcgccaaaccagcggccccgtcctcgaacgcgcaggcgacctcgccgcccttttgaccaaccttgatccgcacgatgtattgttcatcgacgaaatccaccgcctcagccctgttgtcgaagaaatcctctatcccgcgctcgaagactaccggctcgacattatgataggcgaaggacccgccgcccgttccgtcaaaatcaacctgccgcccttcacgctcatcggcgcgaccacccgcgccggtatgctgaccaatccgttgcgcgaccgcttcggcatcgtctcccgccttgagttttacgaaaaccgagaccttaccaccatcgtcagccgttcggcacaactgttgcagctcgatatgtccgaagaaggcgcggaagaaatcgccaaacgcagccgcggtacgccgcgcatcgccaaccgcctgttgcgacgcgtgcgcgatttcgccgacgtgaaaaacaacggcacaatcgacggcggcatcgccgatgccgctttaagtatgctggacgtggacgcgcaggggctggacgtgatggacaggaaatttctcgaagccgttttgcacaaattcggcggcggcccggtcggtttggacaatgttgccgccgccatcggcgaatctacagacaccatcgaagacgttatcgaaccctaccttatccaacaaggcttcctgcaacgcaccccgcgcggcaggatggcgaccgaacgcgcctacctgcatttcgggctgcccgtcgaaaaataa

SEQ ID NO: 67848 - DNA, 1257 bp, Neisseria meningitidis
gtggccaataaattaagaaactacaccatcaacttcggcccgcaacaccctgcggcgcacggcgtattgcgcatgatcttggagctggacggcgaacaaatcgtccgtgccgacccgcatatcggcctcctgcaccgaggcacagagaaactggcggaaaccaaaacctatctgcaagccttgccctatatggaccgcttggattacgtttccatgatggtcaacgagcaggcgtattgtttggcagtagaaaagctcgccggaattgacgtgcctatccgcgcccaatacatccgcgtgatgtttgccgaagtaacgcgcatcctcaatcacttgatgggcatcggttcgcatgccttcgacatcggcgcgatgaccgccatcctctacgccttccgcgaccgcgaagagctgatggacttgtacgaagccgtgtccggcgcacgtatgcatgcagcctacttccgtcccggcggcgtttaccgcgacctgcccgacttcatgcctaaatacgagagcagcaaattccgcaatgccaaagtattgaagcagctcaacgaatcccgcgaaggcaccatgctcgactttatcgatgccttctgcgaacgcttccccaaaaatatcgacacactcgaaaccctcctgaacgacaaccgcatctggaaacagcgtaccgtcggcatcggcgttgtctctcccgagcgtgccatgcaaaaaggctttaccggcgtgatgttgcgcggttcgggcgtggaatgggacgtgcgtaagacacagccttacgaagtgtacgacaaaatggatttcgacatccctgtcggcgtgaacggcgactgctacgaccgctacctctgccgtatggaagaaatgcgtcaatccgtacgcatcatcaaacaatgttccgagtggttgcgtgtcaatccgggtccggtcattaccacaaaccacaaattcgctccgcccaaacgtaccgaaatgaaaacaggtatggaagacctgattcaccatttcaaactctttaccgagggtatgcacgttcccgagggcgagacctacaccgctgtcgaacatccgaaaggcgagttcggcgtttacatcatttcagacggcgcaaacaaaccctaccgcctgaaaatccgcgcacccggcttcgcccatctgcaaggcatggacgaaatggcaaaaggccacatgctcgccgacgtcgttgccatcatcggtacgcaggacatcgtattcggggaggttgaccgataa

SEQ ID NO: 67849 - DNA, 759 bp, Neisseria meningitidis
atgaaaaaagtcagcgtattgattgttgccaaaaacgaagcaaaccacattcgggaatgtattgaaagttgccgtttcgataaagaagttatcgttatcgacgaccacagcaccgacaatactgccgaaattgccgagggtttgggtgcaaaagtcttccaacggcatttgaacggggatttcggagcgcaaaaaacatttgccatagaacaggcaggcggagaatgggttttcctgattgatgcagacgaacgctgcacgccggaactatctgatgaaatctcaaaaattgtccaaaccggcgattatgccgcctattttgtcgaacgccgcaaccttttccccaaccatcccgccacacacggcgcgatgcgtcccgacagcgtatgccgtttgatgccgaagaaagacagttcggtgcaaggcaaagtacacgaaaccgtacagaccccctaccccaaacgccgtctgaagcattttatgtaccattacacatacgacaactgggaacaatatttcaacaaattcaacaaatacacttccatctcagctgagaaataccgagagcagggaaagcccgtgcgtttcgttagggacattatcctccgcccgatttgggggtttttcaaaatttatatcctgaacaaagggtttctcgatggaaaaatgggttggattatgtccgtcaaccacagctattacacgatgattaaatatgtcaaactatattatctgtacaaatctggcggaaaattttaa

SEQ ID NO: 67850 - DNA, 1260 bp, Neisseria meningitidis
atgaaacagaccgtcctcaaaaataacctgcaaaacctgcttgaaagcgcagaaaatatcctgctgcttcaaggccctgtcggcgatttttttctgcgccttgccgactggctgactgcaaacggcaaaaccgtacataaattcaactttaatgcaggcgacgactatttttatccgcccactcaagcgcataccgttgtttttaacgacaactacgatgcctttcctgagtttttgcaagaatacatcactcaacatcacatccaggccgttgtctgctttggcgacacacgcccttatcacgtcattgcaaaacgcattgcaaacgaaaaccaagccagtttctgggcgtttgaagaaggctatttccgcccctactacatcaccttagaaaaagacggcgtcaacgcattttccccgttgccgcgccgtgccgacttttttcttgaacaattccctaagcttgcccagcaagaatataaagcgccaacgccggtacacggcggttttacgcccatggcaaaaaacgctatccgttactatatcgagttgttccgcaatccacgcaaataccccgactacatccaccaccgcgcacccaatgccggccattacctcaaaccgtggtcgctctccatcctcaagcgtttgaactactatattgaagacatccaaatcgccaaacgtgtggaagcaggcaaatacggcaagttttttattgttcccttacaggtattcaacgacagccaagtccgtatccattgcgactttcccagcgtccgcagcttcctgctccatgttttgagttcatttgccgagcacgcgcctgccgataccaacatcatcatcaagcatcatccgatggaccgcggttttatcgactactggcgcgacattaaacgctttatcaaagaacaccccgaactcaaaggccgcgtgatttatgtccatgatgtccccctgcccgttttcctgcgccacggtctcggcatggttaccatcaacagcaccagcggcctgtccggcctgattcacaatatgccagttaaggttctcggccgtgcctattatgatattcccggtattactgaccaaaataccttggcagaattttggaatcatccgacaccgcctgacaaagagctgttccatgcctaccgaatgtaccacctcaacgtgacccaaattaacggcaacttctacagtcaggtcttttttcctaacaaaaaaacctccgactcttccactccagcaacctga

SEQ ID NO: 67851 - DNA, 333 bp, Neisseria meningitidis; identical to SEQ ID NO: 44638

SEQ ID NO: 67852 - DNA, 342 bp, Neisseria meningitidis
ttgttggaagggatagctgaaggtacgaccgtctatgccgacaaaggctatgacagtgcggaaaaccggcaacatctgaaagaacatcagttaccggacggcattatgcgcaaagcctgccgcaaccgtccgctgtcggaagtgcaaaccaaacgtaaccgatatttgtcgaagacccgttatgtggtcgaacaaagcttcggtacgctgcaccgtaagttccgctatgcgcgggcagcctatttcggactgattaaagtgagtgcgcaaagccacctgaaggcgatgtgtttgaacctgttgaaagcggccaacaggctaagtgcgcccgctgccgcctaa

SEQ ID NO: 67853 - DNA, 246 bp, Neisseria meningitidis; identical to SEQ ID NO: 39751

SEQ ID NO: 67854 - DNA, 1380 bp, Neisseria meningitidis
atggcaaaaacgcttaaaaccctttaccaatgcaccgaatgcggcggcacctccccgaaatggcaaggcaaatgcccgcattgcggcgagtggaacacgcttcaggaaagcctggccgcgcccgagccgaaaaacgcccgtttccaatcttgggcggcggacacttcgaccgtccaatccctctccgccgttaccgccaccgaagtgccgcgcaatccgaccggcatgggcgaactcgaccgcgtattgggcggcggtttggtcgatggtgcggtcatcctgctcggtggcgaccccggcatcggcaaatctacgctgctgttgcaaaccatcgccaaaatggcgcaaagccgtaaagtgctatacgtttccggcgaagaatccgcccaacaagtcgccctgcgcgcgcagcgtttggaactgcccaccgaaggcgtgaacctgcttgccgaaatccgcatggaagcgattcaagcagcgttgaaacagcatcagcccgaagtcgtggttatcgattccatccaaaccatgtattccgaccaaatcacttccgcccccggttctgtgtcgcaggtgcgcgagtgtgccgcccaactgacgcgcatggcgaaacagatgggcatcgccatgatactggtcggacacgtgaccaaagacggcgcgattgccggcccgcgcgtgctggaacacatggttgataccgtgctgtatttcgagggcgaccaacattccaactaccgcatgatacgcgccatcaaaaaccgcttcggcgcggcaaacgaactgggcgtgttcgctatgaccgaaaacggtttgaaaggcgtgtccaacccgtccgccatcttccttgccagctaccgcgacgacacgcccggttcgtgcgttttggttacacaggaaggcagccgcccgcttttggtcgaaattcaggcattggtcgatgacgcacacggcttcacccccaaacgcctcaccgtcggactggaacaaaaccgccttgcgatgctgcttgccgtattaaaccgccacggcggcatcgcctgtttcgatcaggatgtgtttttaaacgccgtcggcggtgtgaaaatcggcgaaccggcggcggatttggcggtcatcctcgcgatgctttccagcttccgcaaccgcccgctgcccgaaaaaatggttgcatttggagaaatcggtttgagcggtgaagtccgccccgtcgcgcgcggacaagagcggctcaaggaagcggaaaagctcggctttaaacgcgccatcgttcccaaagccaatatgccgcgcaatgccaaagagtttccgaacctgaaaatctacggcgtttcgagtttgcaggaagccattgatatttgccgcgacagcagggaataa

SEQ ID NO: 67855 - DNA, 2208 bp, Neisseria meningitidis
atgtttcccgaccaatccgcccccaacctcctgcaaggcttgaatcccgaacaactctccgccgtaacctggccgccgcaatccgcccttgtgctggcgggcgcgggcagcggcaaaacgcgcgtgctgaccacgcgcatcgcatggcttttgcaaagcggacaagccagcgtgcatagcattatggcggtaacgtttaccaacaaagccgccaaagaaatgcagacccgtttgggcgcaatgattcccgtcaacgtccgcgccatgtggctcggcacgtttcacggtctctgccaccgctttttgcgcctgcaccaccgcgacgccggtctgccgtcttcctttcaaatcctcgacggcggcgaccagctttccctgatcaaacgcctgctcaaaagcctcaacatcgccgaagaaatcatcgcgccgcgttcgctgcaaggctttatcaacgcgcaaaaagaatccggcttgcgcgcttccgtcttgagcgcgcccgacccgcacacaagccgcatgatcgaatgctacgccgaatacgacaaaatctgccaacgcgaaggcgtggtcgatttcgccgagcttatgctccgcagctacgaaatgctgcaaagcaacgaaatcctgcgccagcattaccaaaaccgcttcaaccacattctcgtcgacgagttccaagacaccaacaaactgcaatacgcctggctcaaactcatggcgggcggaaacgcagcggtatttgccgtcggcgacgacgaccaaagcatttaccgtttccgtggcgcaaacgtcggcaacatgaccgcgctgatggaagaattccacatcgacgcgcccgtcaaactcgaacaaaactaccgctccgtcggcaacatccttgccgccgccaatgccgttatcgaaaacaacgacgaacgactcggcaaaaacctgcgcaccgacgccgaagcaggcgacaaaattcgctactactccgcctttaccgacctcgaagaagcccggttcatcgtggacgaaaccaaagccctcgaacgcgaaggctgggatttggacgaaatcgccgtcctctaccgtagcaacgcccaatcccgcgttatcgaacaaagcctgttccgcagcggcatcccctacaaaatctacggcggcttgcgcttttacgaacgccaagaaatcaaacacgccctcgcctacctgcgcctcgccgtcaatcccgacgacgacaacgccctcttgcgtgtcatcaacttcccaccgcgcggcatcggtgcacgtaccgtcgaaaatcttcagacggcctcaaacgaacaaggcatcaccctctggcaagccgcctgcaacgccggcgcgaaagccgccaaagtcgtcgccttcgtccgcctgattgaagccctgcgcaaccaagtcggacaactgtccctgtccgaaatcatcgtcggcatcctcaaagacagtggcttgaccgaacactaccgcacccaaaaaggcgacaaccaagaccgtctcgacaaccttgacgaactcgtcaacgccgccatcgagttcaaacccgaagacagcaacttcgaaatcctgcctgaaaacatttcagacgatcccgccttccccatcctcgctttcttgagcaacgccaccctcgaatccggcgaaaaccaagcaggcgtgggcgaaaaagccgtccaactcatgaccgtccacgccgccaaaggcttggaattcaacgccgtcttcctcaccggtatggaagaaggccgtttccccagcgaaatgagccttgccgaacgcggcggcctcgaagaagaacgccgcctcatgtacgtcgccatcacccgcgcccgcaaacgcctctacatcaccatggcgcaacaacgcatgctgcacggacaaacccaattcggcatcgtctcccgcttcgtcgaagagatcccacccgaagtattgcactacctgtccgtcaaaaagcctgcctacgacagttacggcaacacgcgccaaaccgccgcatccaaagacaaaatcatcgacgactacaaacagccccaaacctacgcaggtttccgtatcggacaaaacgtccgccacgccaaatttggcaccggcgtgattatcgatgccgcagataaaggcgaatccgcccgactgaccatcaatttcggcaaacagggcgtgaaagagttggacaccaagtttgcgaaattggaagagatgtag

SEQ ID NO: 67856 - DNA, 282 bp, Neisseria meningitidis
  misc_feature 6, 7, 8, 9, 10: 'n' is a, c, g or t
gtgtgnnnnnctctgattgcatgcggttatgcggacggttatccgcgccgcgccccaagcaattcccccgtcgccgtcgacggtaaattgacccgggtcatcggcagggtctctatggatatgatgaccatcgagctggacgcttcgcaagaaggtttgggacacgaggtcgaactgtggggcgatacggttaatatcaataccgttgccgaagcggccggaaccatcccttacgaattgatgtgcaatatcaaacgtgcaaaattcacttatatcgagtaa

SEQ ID NO: 67857 - DNA, 1125 bp, Neisseria meningitidis
atgcagaatacttcctttgataatgaatccgattatagcgacgattcagactttgcgtcagcttccgaaactgaaaaccgtatcggtctgaccgttccgctcgagcttgccggcgggcggttggatgcggtgttggcgaaacttctgcccgactactcgcgcagccgcctgacatcatggattaaagaaggcgcggttattgtaaacgataaaccttcgcaacccaaagacaaaatgataggcggcgagcaaatttgtgtaaccgtccgtccgagtgaggaaaatctggcgtttgttccagagcctatggctttggatattgtttacgaagacgataccgtcatcgtcgtcaacaaaccggccggactggtggtgcatccggcggcgggcaactggacagggacgctgctcaacggcctgttggcgcactgtcccgaattgagccaagtaccgcgcgcgggcatcgtacaccgtttggacaaggaaaccagcgggctgatggtggttgccaaaaccctgccggcgcaaaattccctcgtgaggcagcttcaagagcgcacggtcaaacgcatctaccgcgccgtcgccaacggcatcgtccccttcgacggtaaaatcgaaacccaaatcggacgcgatccgcacaaccgcctgaaaatggcagtcgtcaaattcggcggcaaaccagccgttacccacgtcaaagtgttggaacgctatcttacccacagctatatcgaatgctcgctcgaaacgggcaggacgcaccaaatccgcgtacatatgcgcgaagccaaccatccgcttgccggcgacccggtttacggcaacccgcgccatccgtgcggcgacacggtgaaagaagccgttaaaagtttgggtgcgcgtcaggcgttgcacgcctaccgcttgagttttacccatccggaaagcggcgaaaccgtttcgtttgaggcaccgattccggacgacatatatcatttgttgtctgtcctccgtcttgaagccggtttggattcgtctttgagcaatgaagaggaatggcaggacaaattcggcgcggacgacgatgacgattggaacgaagacgactacgatgtcgaagtggtttatgtaagggagtga

SEQ ID NO: 67858 - DNA, 1089 bp, Neisseria meningitidis; identical to SEQ ID NO: 59388

SEQ ID NO: 67859 - DNA, 558 bp, Neisseria meningitidis
ttgggtttcggctgtcgggagggaaaggaattttgcaaaggtctcagcctgcccgaaatcatccgcgacctgctcgaaatgccgtctgaaaccgccgttgccgacatcgcacgcacctattccgcgcattacctcaatcccaacaaccgcaatatgacgctctttcccgatgccctgccctgtctggacacgctcaaagcacaaggatactggcttgccgtcgccacgggcaaagggcgggcgggcttggacaacgccatcagccaaaccgccaccggcggctattggctcgccaccgcctgcgcgggggaatatccctccaaaccctcgcccgaaatggtattcggactctgcggcgaactgggactcgatccgaaagaagcattggtcgtcggcgatacggcgcacgacctgcatatggcgacaaacgcaggcgcggcggcagtcggcgtggccaccggcgcacattcgcgcgaacagctccttagcgcaccgcatctcgccgtattggacggtttgtccgaactgcccggttttcttgcacagcattacgcctga

SEQ ID NO: 67860 - DNA, 303 bp, Neisseria meningitidis
ttgtccgccgtttttattgcaccttacctgacggcatttcacgaacaagaaaaaacattagaatatgcggaattgaccgttaccgcccccaaccgcagcggacgggcaatcaaactggatgcagacgggcagcattaccggctttcctgctatgggttcgacagtttgtgcacaggcggcaatatcggcagaaccatcagggcggagcaggttagagccgttttaagcgaaaccgtcggcaaaggttttttaaacggcgttctgttggaataccgcaacagtggcagtgtctataagcaataa

SEQ ID NO: 67861 - DNA, 1158 bp, Neisseria meningitidis
atgaaattcgccacgaaagccattcattccagctacgattgcgacgaacacaaccgcgcgctgatgccgccgatttatcaaaacagtatgtttacgttgcacgagattggcgaaaatgtgccttaccgctattcgcgcctgagcaacccgacccgtcaggtattggaagataccgttgccgatttggaacacggtgcggccggctttgcgttttccagcggtatggcggggattgatgccgtgtggcgtactttcctgcgcccgggcgatactattgttgccgtcgccgatatttacggcggcgcgtatgatttattggtcgatgtttatcaaaaatggggggtgaacgttgtttttgccgatttgggcaatccggataatctggacgaactgctcaaagcgcacaatgtcaaattggtttggctggaaacgccgtccaatccgcttttacgcttggtagacatcaaagcccttgccgcgaaagccaaagcggccggcgcactggtcggcatcgacaacacctttgccacgccgtatctgcaacagcccttggatatgggttgcgattttgtgttccattccgctaccaaatatttgtgcggccattccgacgtgttgatgggcatcgtcgttgccaaaaccaaagaactggcgcagcctttgcacgatatgatggtgcataccggcgcggttgccggcccgctggactgctggctggtgttgcgcggcatcaaaacactggctctgcgcatgaacgcccattgccaaaacgcactcgaaatcgcgcgccgtttggaagcccatcctgccattgaaaaagtgttccatcccggcctgccgtctcacgaacattacgcactcgcccaagcgcaaatgcctaaaggcatcggcggcgtggtgacggtttatctcaaaaacgacacgcgtgaagcggcaaacagcgtgattaaaaacatgaaactggtcaaaatggcttccagcctcggcggtgtggaaagtttggtcaaccattgctattcccagtcccacagcggcgtgccgcataatgtgaaaatggaaatgggcatcaaagtcggtctgctgcgcttctccatcggcatcgaagacgcggacgatatttggaacgatatttccgccgcactcgatacaactttgtaa

SEQ ID NO: 67862 - DNA, 1287 bp, Neisseria meningitidis; identical to SEQ ID NO: 36417

SEQ ID NO: 67863 - DNA, 1644 bp, Neisseria meningitidis
  misc_feature 1621, 1622, 1623, 1624, 1625: 'n' is a, c, g or t
atgcgctttgcagtcgctttgctcagtctgctgggtattgcatcggttatcggtacggtgttgcagcaaaaccagccgcagacggattatttggtcaaattcggatcgttttgggcgcagatttttggttttctgggactgtatgacgtctatgcttcggcatggtttgtcgttatcatgatgtttttggtggtttctaccagtttgtgcctgattcgcaatgtgccgccgttctggcgcgaaatgaagtcttttcgggaaaaggttaaagaaaaatctctggcggcgatgcgccattcttcgctgttggatgtaaaaattgcgcccgaggttgccaaacgttatctggaagtacaaggttttcagggaaaaaccattaaccgtgaagacgggtcggttctgattgccgccaaaaaaggcacaatgaacaaatggggctatatctttgcccatgttgctttgattgtcatttgcctgggcgggttgatagacagtaacctgctgttgaaactgggtatgctgaccggtcggattgttccggacaatcaggcggtttatgccaaggatttcaagcccgaaagtattttgggtgcgtccaatctctcatttaggggcaacgtcaatatttccgaggggcagagtgcggatgtggttttcctgaatgccgacaacgggatattggttcaggacttgccttttgaagtcaaactgaaaaaattccatatcgatttttacaatacgggtatgccgcgcgattttgccagtgatattgaagtaacggataaggcaaccggtgagaaactcgagcgcaccatccgcgtgaaccatcctttgaccttgcacggcatcacgatttatcaggcgagttttgccgacggcggttcggatttgacattcaaggcgtggaatttgggtgatgcttcgcgcgagcctgtcgtgttgaaggcaacatccatacaccagtttccgttggaaattggcaaacacaaatatcgtcttgagttcgatcagtttacttctatgaatgtggaggacatgagcgagggcgcggaacgggaaaaaagcctgaaatccacgctgaacgatgtccgcgccgttactcaggaaggtaaaaaatacaccaatatcggcccttccattgtttaccgtatccgtgatgcggcagggcaggcggtcgaatataaaaactatatgctgccggttttgcaggaacaggattatttttggattaccggcacgcgcagcggcttgcagcagcaataccgctggctgcgtatccccttggacaagcagttgaaagcggacacctttatggcattgcgtgagtttttgaaagatggggaagggcgcaaacgtctggttgccgacgcaaccaaaggcgcacctgccgaaatccgcgaacaattcatgctggctgcggaaaacacgctgaacatctttgcacaaaaaggctatttgggattggacgaatttattacgtccaatatcccgaaagagcagcaggataagatgcagggctatttctacgaaatgctttacggcgtgatgaacgctgctttggatgaaaccatacgccggtacggcttgcccgaatggcagcaggatgaagcgcggaatcgtnnnnncacacacttaattaattaa

SEQ ID NO: 67864 - DNA, 657 bp, Neisseria meningitidis
atgaccattaaaattatcctgatagacgaccataccctcttccgcagcggcattaaatcccttttgtcgcgccaacatgattttgaggtcatcggcgaagccgcagacggcctctcgggcattaaaatgatcaaccggctccaacccgatgtcgtcctgcttgaccttgatatgcccggtatgaacggacgcgaagcactctcccaaatcatcagcatcaatccgcagcaggcagtgattatgctgaccgtttccgaagacaacgacgacttgaccgaatgtatgcgcatcggcgcgcgcggctacctgctgaaaaacatcaacgccgactttctgctcgaaagcatacgcaaagccgccgaaggcgataatgtattctcgcccgagatgaccgccaaactcgtcaaaagcctgatttccccccaacctgcccaagggacgcaggcactctcctcacttacccctcgcgaactggaaatcttgggctatctcgccgcaggacacagcaacaaaatcatcgcccgccacctcgatcttgccgaatccaccgtcaaagtccacgttcaaaacctgctccgcaaactcaacctcagcagccgggtgcaggccgctgtttacgccatccggcacaacgtcccccaacccgtgctggaataa

SEQ ID NO: 67865 - DNA, 621 bp, Neisseria meningitidis
  misc_feature 602, 603, 604, 605, 606: 'n' is a, c, g or t
atgagctacacgcaactgacccaaggcgaacgataccacatccaatacctgtcccgccactgcaccgtcaccgaaatcgccaaacagctgaaccgccacaaaagcaccatcagccgcgaaatcagacggcaccgcacccaagggcagcaatacagcgccgaaaaagcccagcggcaaagccagactatcaaacagcgtaagcgacaaccctataagctcgattcgcagctgattcagcacatcgacacccttatccgccgcaaactcagtcccgaacaagtatgcgcctacctgtgcaaacaccaccagatcacgctccaccacagcaccatttaccgctaccttcgccaagacaaaagcaacggcagcacgttgtggcaacatctcagaatatgcagcaaaccctaccgcaaacgctacggcagcacatggaccagaggcaaagtccccaaccgtgtcggcatagaaaaccgacccgctatcgtcgaccagaaatcccgtatcggcgattgggaagccgacaccattgtcggcaaaggacagaaaagcgcattattgaccttggtcgaacgcgttacccgctacaccatcatctgcaaatnnnnncacacacttaattaa

SEQ ID NO: 67866 - DNA, 276 bp, Neisseria meningitidis
atgaatgagggtgaagttgttttaacaccagaacaaatccaaaccttgtatggttatgctttccgtggcgatacctatggcggttggcgttatttggctaatttgggtgaccgttatgcggatgatgctgctgcaattgtcggtaaggatgcaaacttaaatggtttgaatttatggatgaaaaaaggtgtggaaaacctatgggatgatacggtcggtaaaaagatccgtttaatgtgtatttccgttttttggattgtggttttcaatttgtag

SEQ ID NO: 67867 - DNA, 963 bp, Neisseria meningitidis
atgcagtatgcaaaaatttccggcacgggcagctatcttcccgccaaccgcgtcagcaatgacgaccttgcccaaaaggtagatacctctgacgagtggattaccgcgcgtacgggcatcaagttccgccatattgcagccgaaaatgagaaaaccagcgatcttgccgccgaagcagcccgccgcgcactggatgcagccggattagacagcggcgaaatcgatttaattattgtggcgacggcaacgccggatatgcagtttccttctaccgccaccatcgtccaacaaaaactgggcatcaccaacggctgccccgcgtttgacgtacaggcggtgtgtgcgggctttatgtacgcgctgaccacggcaaacgcctacatcaaaagcggcatggcaaaaaacgcgctggtcatcggcgcggaaactttcagccgcatcgtcgattggaacgaccgcacaacctgcgtattgttcggcgacggcgcgggcgcggtggttttgagcgcggcggacaaaccgggcatcatccacagcaaactcaaagccgacggcaattatctgaaactcttaaacgtccccgggcaaatcgcctgcggcaaagtttccggttcgccgtacatttcgatggacggtcccggcgtgttcaagtttgccgtcaaaatgctgtccaaaatcgccgatgacgttatcgaagaagccggttacaccgccgctcaaatcgactggatcgtgccgcatcaggcaaaccgccgcattatcgaatcgaccgcgaaacatttaggtttgagtatggacaaagtcgtcctgaccgtccaagaccacggcaacacatccgccgcctcgattccgctggctttggatacgggcatccgcagcggacaaatcaaacgcggtcaaaacctgctgctcgaaggcatcggcggcggtttcgcgtggggcgcggtgctgttgcaatattga

SEQ ID NO: 67868 - DNA, 2079 bp, Neisseria meningitidis
gtggtttcccgacaaaacccgcgtcggctggtggaaaaacggctaccccaaatatttcggcaaaccatcaacgcgctcaatttcagcaaagtcaaaatctttgtcgacgggcaggaagtggacttggcgaaaaacggtgttgccggcttctccgtcgaactcgatatgcagcacggtgtgttgcgccgcttgttcaccgtattcggcgtgcgtttcgatgtgtgcaaattcctgtccgtcgcgcaaaaagagctggcggttatccgctgggaagccgtatccgttgacggcaaaacccaccaagtccgcatcgattccatcatcgatgccgacgtgaaaaacgaagattccaactacgaagaaaaattctggcaggtattggacaaaggcgtttcagacggcctctcctacattgccgcccaaaccgttgccaaccctttcggtgtggaacaatttatcgtcaacgccgagcaaactttcgccggcagcttcaaagctctcggtagcagccaaaccgactggcaggtctccaattctttcgagtccgaagtcggcggcacgcccgaaacctttgaaaaacgcgtgattgttaccaccagccgcgattatcagggcttggaagcagtgaaagccgcaggccgcgccttgtcggaaaaagtcgcaggcgttgcgtttgaaaccttgctggacgcgcacaaagcaggctggctgcaccgttgggaaatcgccgacgtggtcatcgaaggcagcgacgaagcgcagcaaggcatccgtttcaatctgttccaactgttctccacctactacggcgaagacgcgcgcctgaacatcggccccaaaggctttaccggcgaaaaatacggcggcgcgacctattgggataccgaagcctatgccgtaccgctctacctcgcactggcggaacccgaagttacccgcaacctgctgcaataccgccgcaaccaactgccgcaggcgcagcacaacgcgcgcgaacagggcttggcgggcgcactctatccgatggtaacgtttaccggcatcgagtgccacaacgaatgggaaatcaccttcgaggaaatccaccgcaatggcgcgattccttacgccatctacaactacaccaactacaccggcgacgaaagctatcttgccaaagaaggcttggaagtcttggtcgaagtgtcccgcttctgggcggaccgcgtccacttctccaaacgcagcggcaaatacatgattcacggcgtaaccggcccgaacgaatacgaaaacaacatcaacaacaactggtacaccaacaccctcgccgcatgggtattggactacacccgcgaagccctggcgaaatacccgcgtccggatttgaacgtgagcgccgccgagttggaaaaatgggcggacatcagcgcgaatatgtaccgtcctcatgacgaagaactcggcgtattcgtgcaacacgacggcttcctcgacaaagacatccgccccgtgtccgcgctttcgcccgacgatttgccgctcaaccagaaatggtcgtgggacaaaatcctgcgttcgccctttatcaaacaggcggacgtattgcaaggcatctatttcttcggcgaccgtttcaatatcgacgaaaaacgccgcaacttcgacttctacgaaccgatgaccgtgcatgaaagctcgctgtcgccctgtatccactctattctcgccgccgaactgggcaaagaagaaaaagccgtggaaatgtaccggcgcaccgcccgcctggacttggacaactacaacaacgacactgaagacggcctgcatatcacctccatgaccggttcgtggctcgccatcgtccaaggtttcgcccaaatgaaaacctggggcggcaaactcagcttcgcaccgttcctgccgggcgcgtggacaggctatgccttccacatcaactaccgaggccgtctgattaaagtcgccgtcggcaaagaaaacgtcgtcttcaccctgctcaaaggcgagccgctcgatttgcaggtgtacggcaaagacatcacactcaacggcagccataccgccgcgttggaaaaataa

SEQ ID NO: 67869 - DNA, 1380 bp, Neisseria meningitidis
atgtttgctttcaaatccttactcgatatgccgcgcggtgaggcacttgccgtcgtcgtcgctctgattgccgcgatgggctataccatcatttcattggagtggctgccgcatatgtccattattgccgccatcgtcgtgctgattttgtacggcttggcgcgcggtttgaaatacaacgatatgcagcagggcatgataggcgcgttgaatcagggtatgggcgcgatttacctgtttttcttcatcgggctgatggtcagcgcactgatgatgagcggtgcgattccgacgctgatgtattacggtttcgggctgatttctccgacttatttttatttttccgccttcgcgctgtgttccgtcatcggcgtgtccatcggcagcagcctgaccacctgtgctacggtcggcgttgcctttatgggtatggcggcggcgtttcaggccgatatggcgatgacggcgggcgcgattgtttccggtgcgtttttcggcgacaaaatgtccccgctttccgacaccacgggcatttccgcgtccatcgtcggcatcgacttgtttgagcacatcaaaaatatgatgtacaccaccatccccgcgtggctcatcagtgcggcactgatgctgtggcttcttcccagtgtcgccgcgcaggatttgaacagcgtcgaatccttccgcagccagcttgaagccacgggattggtgcacggctattcgctgattccgtttgcgctgttggtcattttggcattgatgcgcgtcaacgccgtggtcgccatgctctttaccgtcatggttgccgttgccgtaacgtatctgcacagcacgcccgatctgcgtcagctcggcgcgtggttttacggcggttacaaactcgaaggcgaagcgtttaaagatgttgtcaaactgatttcgcgcggcggtttggaaagtatgttcttcacgcagaccatcgtgattctcgggatgagtttgggcgggctgctgtttgcgctgggcgcgattccttccctgctggatgccgtccgcagctttttgacgaatgccggacgtgccacattcagcgttgccatgacttcggtcggggttaatttcctgatcggcgagcaatatttgagtattttgttgtcgggtgaaacgttcaaacccgtttacgataagctcggtctgcattcgcgcaatctgtcgcggacgctggaagatgcggggacggtgattaacccgctcgtaccgtggagcgtatgcggcgtgttcatcagccacgcgctgggcgtgccggtttgggaatatctgccgtatgcctttttctgctatttgagtttggctttgaccctgttattcggttggacggggctgactttgagcaaaaaataa

SEQ ID NO: 67870 - DNA, 1512 bp, Neisseria meningitidis
atgagcgaacaaaaccatccgcaaaccgagccgcagttggacgaaaaccaaatcatcgccctgcgccgcgaaaaactgcacaacatccgccaacagcgcaacgcctaccctaacgatttcaaacgcgacagctttgccgccgacctgcatacccaatacggtgaaatcggcaaagaagaactcgacccacaaggcattcccgtcaaaattgccggccgcatgatgctcaaacggcaaatgggcaaggcgagttttgccaccattcaagacgtgtccgggcaaatccagctttatctgaacaacaaaggcgtgagccaagaagttttggacgacttcaaccattgggatttgggcgacatcgtcggcgcggaaggcactttgttcaaaaccaaccacggcgaactgaccgtacgcgtgtccgacatccgcctgttgtccaaatccttgcgtccgctgccggacaaacacaaaggcttgagcgatcaggaaaccaaataccgccaacgctatgtcgatttgattgccaacgaagaatcgcgcaatacctttatcaaacgcagccaaatcatccaatccgtgcgtaattttatggtgggcgagcattatctcgaagtcgaaaccccgatgatgcacccgattcccggcggcgcgacggcgaaaccgttcgtgacccaccacaatgctttggacatcccgctctacctgcgcatcgcgcccgagctgtatctgaaacgcttggtggtcggcggtttggagcgcgtgtttgaaatcaatcgcagcttccgcaacgaaggtatgtccgtgcgccacaatcccgaattcaccatgatcgaattctacgaagccttctccgactacgaacgtatgatgcagatggcagaagacatcatccgcaacgcatcgcgcacagtaaacggtacggcaaacatcacttacaatggcaaagaagtcgatttggaaagcccgttcgagcgtctgaccatcctcgaagccatcaaaaaatacaatccgcactacaccgacgagcagttgaacgatgcggaatggctgaaaaaagaaatcgtcaaacacggtgaaagcctgccgccgtccccgggcatcggcagcctgcaactcgcgctgtttgaaggttgcgccgagggcaagctgtggaacccgactttcatcatcgattacccggtcgaagtttccccgttggcgcgcgcttcggataccaaacaaggtctgaccgaacgtttcgaattgttcgttgtcggccgcgaactggcaaacggctattcagaattgaatgaccctgaagaccaagccgaacgcttcaaatcgcaagtcgcacaaaaagacgcgggcgacgacgaagccatgcattacgatgccgactacatccgcgcgatggaatttggtttgccgccgaccggcggttgcggcatcggtatcgaccgcttggtgatgttgctgaccgattcgcaaaccatccgcgatgtgattctgtttccgcagatgcgtcccgagtaa

SEQ ID NO: 67871 - DNA, 171 bp, Neisseria meningitidis; identical to SEQ ID NO: 37387

SEQ ID NO: 67872 - DNA, 1563 bp, Neisseria meningitidis
atggcaaaacaatcaaatgccgcgccgaaaaagcgcggtttttttgcgcgtttgttcggcaggcgggaagccgtcccgaaaacagcccgccgcaactttgcaggggcgcgtccggtcgggtcgctggcttcgtggcagccgcaaaactggtcggcggacgctttggcgcggtcagaccttgaccgcctgcgcgcccgcgcccgcagccttgcacgcgacaacgactacatgcgcaagtttttgaatatggtcgaaagcaacgttatcgggcgcgacggttttgccctgcaaatgcgtgttttgctggataacgccgacaagcccgatgccttggcgaacaaggccattgaagcagcgttttcccgctgggcgcggcgcggcgtgtgcgacgttaccggccagatgtcttttaccgacctgcaacggctgctgattcgcagcgtggcgcgggacggcgaagtgctgattcgtcatatttcagggtttgacaatgattacggctatgcgttgcaggtgctggatattgaccgtttggatacgggatacaacgttccgcagcaaaacgggcgtaacgccgtgcgcatgggtgttgagttaaacagctattcccgtcctgtagcgtactggttgcggacggcacatccgggcgaatcatacggacagacgaatacgggcaatttacgcgaacgggtgccggcagagcaaatcagccatattttcctgcatgaccgcccagagcagcggcgcggctttccgtgggtggcttcggccatcatcggcctgcaaaacctgtcgggctatcaggaagcggccattatcgctgcccgtgtcggtgcatcgaaaatgggctttttcaaacagacggaagacgccgacaacttcatgccgccgattgacgggcaagaggtcgataacgggcgcggcagcatcgatttaatcgattcggtcgagccgggtacgtttcacgaactgccgcagggttacgactttacgccgtttgatccggattacccgcacgccaattacgacgcattcgtcaaagccagcctgcgcggtatcgccagcggtttgaacgtggcttatcacagcttggcgaacgaccttgagggcgtgaacttttccagtatccgcagcgggacgctggaggaacgcgacacatggatgacgttgcaaaactggtttgccgacgcgttcttgtatgacgtattcgatcgctggattgaggcggcgttgctaatgggcgcaatcaagatgccgtccggcaaatcgctgcctgccggcaagctggacaagttcaaggcctgcaactggcaggggcgccgctggtcgtgggttgacccgctgaaagatattaatgcgcataaagaggcggtggcgctggcagtcaaatcccgccgcgatatttgcgcggaaatgggtttggattttgaagatgttattacccaaatcgaacaggaaaaccagatgttggcaggaaaaggaatcattgccgacgtaaaaccggccgcatcggcggcagaaccggaatcggaggataacccgaatgaagaaaatgaagcctga

SEQ ID NO: 67873 - DNA, 336 bp, Neisseria meningitidis
atgtttaaagattggaaagaacataccgcattggttaaaaaatcgttcggcgagctgggtaaggcgcatcctaaaatgctgcaggcctacggcgcattggaacaggccgccgccgccgaagcacttgatgccaaaacgcgcgaactgattgccatcgccgttgccattaccacacgttgtgagagctgcatcagtgttcacgccgccgccgccgccaaagccggtgcgaccgacagcgaaatcgccggcgcattggcaaccgccatcgccctgaatgccggtgccgcttacacttacgccctgcgtgcattggaagcggttgaaacgcaaaaataa

SEQ ID NO: 67874 - DNA, 597 bp, Neisseria meningitidis; identical to SEQ ID NO: 38176

SEQ ID NO: 67875 - DNA, 345 bp, Neisseria meningitidis
atgaacatcatccgcgcgctcctcatcatcctcggctgcctcgccgccggcgaaaccgccattttcctagcaggcatcaaactgcccggcagcatcgtcggcatgggcgtgctgtttgcgcttttgcaggcaggttgggtcaaaacgtcttggctacaacagcttaccgacgcgctgatggcgaatctgacgctgtttctcgtgccgccctgcgtggcggtcatcagctatttggatttgattgccgacgattggttttcgatactggtttccgcctccgccagcactttgtgcgtactgctggttacaggcaaggttcaccgctggatacggagcattatctga

SEQ ID NO: 67876 - DNA, 1011 bp, Neisseria meningitidis
atgtccatcaaaatcctgattatttctcccagttggataggcgactgcgtgatgacccagcccttgttccgccgtttgaaggaacttcatcccggttgcacgattgatgtgttcgcaccgaagtggtcgatggcggtgtttgagcgtatgccggaagtgaatgagattcttgaaaatccgttcggacacggtgcgttggagttgaaacgccgttggcgggtcggcagggatttggggcggcgcggatacgatcaggttattgtgttgccgggttctttgaagtcggcagtcatcgcgctggcaacgggcatcggaaaaagaacgggttatgtcggtgaaagccgttattttctgttgaacgatatacgcaggctggataaggaacgtctgcctttgatggtggacagatatacggctctcgcgcatccgagccaggaggattttgacgggcattcgggattccccgagttttccattgatgaacggcggcgggaaatttctgtcgaaacctttggcttggatattggaaagcctgttctggctttttgtccgggtgcggaattcgggccggcaaagcgttggccgacaaagcattttgccgagttgggcaaacattattcggcggcgggttggcaggtttggctgttcggttcgcaaaaagatgatgaaattgccgaggaaatcaaccgcctttcagacggcatatgtgtgaatttatgcggaaagaccgatttgtcgcaggcaatggatttgctgtcgttggcggacacggtcgtatgcaacgacagcgggctgatgcacttggcggcggcattgggcaggaaggtggtggcggtttacggttcttccagcccgacgcatacgccgcctttgagcgacagggcgaaaatcgtcagcctgcacttggaatgttcgccctgttttaagcgggaatgtccgctggggcataccgactgcctcaacaggctgtatcccgagaagattgtgcaggcggttgaagaggcggtatga

SEQ ID NO: 67877 - DNA, 405 bp, Neisseria meningitidis; identical to SEQ ID NO: 40476

SEQ ID NO: 67878 - DNA, 1143 bp, Neisseria meningitidis
atgaaggtttttaaacaacagcttgaacaactcggcgcgcaaaaccaatatcgttcgattccggatttgattcatcaagggcggtatattacgcgggaaaaccgcaaaatgctgaatatgtcgtctaatgattatttgggtttggcatcagatgaaaacttgcgccggtcttttttgcagcaatacggcggtaattttccctcttttaccagttcttcatcgcgtttattaacgggcaactttcctatttataccgatttggaagagcttgtcgcacaacgtttccaacgggaaagcgcgttattgttcaacagcggctatcacgccaatctcggtattttgcctgctttgacgacgacgaaaagtttgattttggcagataaatttgttcacgccagtatgattgacggcatccgtttgagccggtgtgcgtttttccgttatcgtcataatgattatgaacatttgaaaaatctgcttgaaaaaaacgtcggaaaatttgaccgcacttttatcgttaccgaatctgttttcagtatggacggcgatgtggcggatttgaaacagcttgtccaattaaaaaaacagtttcccaatacttatctttatgtggatgaagcccacgcaatcggtgtttatgggcaaaacggattggggattgccgaacgggataatttgattgccgagattgatttactggtcggcactttcggtaaagccttagcctcggtgggggcgtatgccgtctgcaaccaagtattgaaagaatgtttgattaatcaaatgcgtccattgattttttcaaccgcattgccgccgtttaatgtggcttggacttattttatttttgaacgattgccgcaattctcaaaagaaagaagccatcttgagcagttaagcgcatttttacggcgggaagtggcgcatcggacgcaaataatgccgagccaaacctgtatcgtcccctatattttaggcgggaatgaagccgcccttgccaaagcggaatatctgcaaaggcagggttattattgcctgcccatcagaccgccgacagtacccaaaaacacatccagaatccgcctgtctttaacggcagatatgacaacggatgaagtgcggcagtttgcggtatacctgtaa

SEQ ID NO: 67879 - DNA, 966 bp, Neisseria meningitidis; identical to SEQ ID NO: 42827

SEQ ID NO: 67880 - DNA, 390 bp, Neisseria meningitidis
atgaacccgcacgagaaactcttgaccaccgacaaccccatcttgcgccaacgcgccaaagccatgcgccaagaaatgagcgaggcggaagcaaaattgtggcagcacctgcgggcaggccgtctgaacggctataaattccgccgccagcagccgatgggaaactatattgttgattttatgtgcgtaacgcccaagttgattgtcgaagcagacggagggcagcacacagaacaagccgcatacgaccacgcgcggacggcatatctcaacagcttgggctttaccgtactgcggttttggaatcacgagattttacagcagacaaacgatgtgctgacagaaatcctgctcgtgttgcaagaattggaaaagcaagctgcacgatag

SEQ ID NO: 67881 - DNA, 156 bp, Neisseria meningitidis
atgcgcgataaaatcaaactggaatccagtgcaggtactggtcacttctacaccactaccaaaaataaacgcactatgcccggcaaactggaaattaaaaaattcgatccggttgcccgcaaacacgtagtgtacaaagaaaccaaactgaaataa

SEQ ID NO: 67882 - DNA, 426 bp, Neisseria meningitidis
atgaaaacagcccgccgccgttcccgcgagcttgccgtacaagccgtttaccaatcccttatcaaccgcaccgccgcgcccgagattgctaaaaacatccgcgaaatgtccgactttgccaaggcagacgaagaattgttcaacaaacttttcttcggcacgcaaaccaatgcggcagagtacatccaacaaatccgcccgctgctcgacagggacgaaaaagacctcaaccccatcgaacgcgccgtcctgctgaccgcctgccacgagctgtccgccatgcccgaaacgccctaccccgtcatcatcaacgaagccatcgaagttaccaaaaccttcggcggcacggacgggcacaaattcgtcaacggcatcctcgacaaactcgctgcccaaatccgccccgacgagcccaaacgccgttga

SEQ ID NO: 67883 - DNA, 258 bp, Neisseria meningitidis
atggtattctgcgtcaagctcaacaaagaagccgaaggcatgaaatttccaccgcttcccaacgaattgggcaagcgcatttttgaaaacgtatcgcaagaagcatggatggcgtggacgcgccaccaaacgatgctgattaacgaaaaccgcttaagccttgccgatccgcgcgcgcgcgaatacctagctcagcagatggagcagtatttcttcggcgacggcgcggatgccgtgcagggatacgttccgcaataa

SEQ ID NO: 67884 - DNA, 864 bp, Neisseria meningitidis
atgaataacgctttcgcattacccgccatccaaagcggcaacggcagcctcgaacaatacatccacaccgtcaacagcatcccgatgctgtcccaagaagaagaaacccgcctcgccgaacgccggataaagggcgacctcaacgccgccaaacaactcatcctgtcccacctgcgcgtcgtcgtttccatcgcgcgcggctatgacggctacgggctgaatcaggcagacctgattcaggaaggcaatatcggactgatgaaggcggtcaaacgctacgagccaggtcgaggcgcgcgtctgttttcatttgccgtacactggattaaagccgaaatccacgagtttattttgagaaactggcgtttggttcgcgttgccaccaccaaaccgcaacgcaagctgtttttcaatttacgcagtatgcgtaaaaacctcaacgccctgtctcccaaagaggcacaagacatcgccgacgatttgggtgtcaaactttccgaagttctggaaatggaacagcgcatgacgggacacgacatcgccatcatggcagacaacagcgacgacgaggacagtttcgcccccatcgactggcttgccgaccacgattccgaaccgagccgacaactatcgaaacaggcgcattacgccctgcaaacagaaggtttacaaaacgctttggcgcaactggatgacaggagccgccgtattgtggaaagccgctggcttcaagacgacggcgggctgacgctgcaccagcttgctgcagaatacggcgtctctgccgagcgcatccgccagattgaagcaaaagccatgcagaaactgcgtggtttcctgaccgaagaagccgaagcggtttga

SEQ ID NO: 67885 - DNA, 345 bp, Neisseria meningitidis
ttgattggcagccgatcgagcaaaggtacgaccatctatgccgataaaggctatgacagtgcggaaaaccggcaacatttgaaagaacatcagttaccggacggcattatgcgcaaagcctgccgcaaccgtccgctgacggaaacgcaaaccaaacgcaaccgatatttgtcgaagacccgttatgtggtcgaacaaagcttcggtacgttacaccgcaaattccgctatgcgcgggcggcctatttcggactgattaaagtgagtgcgcaaagccatctgaaggcgatgtgtttgaacctgttgaaagccgccaacaggctaagtgtgcctgttgccgcctaa

SEQ ID NO: 67886 - DNA, 1035 bp, Neisseria meningitidis
atgcaaaccctgaccattatccgccccgacgatatgcacctgcacctgcgcgacggcgacgcgctcaaagccgttgctccttataccgcccgccaaatggggcgtgccgtcattatgcccaacctcaaaccgcctgtcgtcagcgttgccgacgcgcttgcctacaaagcgcgcatcatggcggcattgcccgaaggcagcgcgtttgagccgttgatgacgctttacctgaccgaccaagccacgcctgcacttgtgcgcgaagccaaagccgccggcatcgtcgccttcaaactctaccctgccggcgcgaccaccaattccgattccggcgtaaccgacctgttcaagctcatccccgtgttggaagaaatggcgaaacagggcattttgttcctcgttcacggcgaagtaaccgaccccgaaatcgacatcttcgaccgcgaagccgcctttatcgggcgcgtgatgaaacccgttttggcgcaagtgccgaatcttaaagtcgtgttcgaacacatcaccaccgccgaagccgcccgcctggttttggaagcaggcgacaacgtagccgccaccgttaccccgcaacacctcctgctcaaccgcaacgacctcttggtcggcggcgtgcgcccccatcatttctgcctgcccgtactcaaacgcgaaacccaccgtcaggcattggttgccgccgttaccggcgagaaggcgcacaaattcttcctcggcaccgactccgcgccgcacgccaagtccgccaaagaaaacgcctgcggctgcgccggtatgttcagcgcgatgaccgccgtcgagctttacgccgaagtgtttgaaaaagcaggcgcgttggacaaactcgaagcctttgcctcgaaaaatggcgcaaggttttacggcattccggaaaacgccggcacgatcaccctcgtcaaacaaagccaaaccgtccccgcaagtgttccctacggcgacggcgaacttgtcccgatgcgcgcgggcggcgaaatcggctggacggtgcagtattga

SEQ ID NO: 67887 - DNA, 1413 bp, Neisseria meningitidis
gtgaaaccgctgcgcagactgacaaacctccttgccgcctgcgccgtagcggccgctgctttcggacagcccgccctcgcggcggacttggcgcaagatccgttcattaccgataacgcccaacggcagcactacgaacccggcggcaaataccacctcttcggcgacccgcgcggcagcgtttccgaccgcaccggcaaaatcaacgtcatctatacccaccagatgggcaacctgctcatccaacaggcaaacatcaacggcacaatcggctaccacacccgcttttccggacacggacacgaagaacacgcccccttcgacaaccacgccgccgacagcgcaagcaaagaacaaggcaacgttgacgacggctttaccgtgtaccggctcaactgggaaggacacgagcaccatcccgccgatgcctacgacggcccgaagggcggcaattaccccaaacctacgggcgcacgcgacgaatacacctatcacgtcaacggcacagcacgcagcatcaaactcaatccgaccgacacccgcagcatccggcaacgcatatccgacaactacaacaacctcggcagcaatttctccgaccgcgccgatgaagccaacagaaaaatgttcgagcacaatgccaagctcgaccgctggggcaacagcatggagtttatcaacggcgtcgccgccggcgcgctcaacccctttatcagcgcgggcgaagccttgggcataggcgacatactgtacggaacgcgctatgccatagacaaagccgcaatgcgcaacatcgcccccttacccgccgagggcaaattcgccgccatcggcggcttgggcagcgtggcgggctttgaaaagaatacgcgcgaagccgttgaccggtggatacaggaaaaccccaatgccgccgaaaccgtcgaagccctggtcaacgtcctgccatttgccaaagtcaaaaacctgacaaaggcggcaaaaccggggaaggctgcggttagtggggatttctcagactcctacaagcataacactgcttcaagattatctcagtctgtagatggagaaatgtttcaaacccgcaatgttgattttaaagcaaaatctattgggactaaaattcatgatggagctcaagggaaacatatttcaggacatagaaactacattgaaggtaagagtactttaaatcaaaacattaatcctcaagaattgttgaacggaatacattcaggtgcttatccagttatttctaaaggagcaagaggaaatcctgttgttgattttgggtatcctataggcagcgatgggaaatcaggattaagtaccaattttggtacgattcattcaggtaaaaatggagttcacattgttccggctaaccctaaaaccattaaaaaggtgcaatag

SEQ ID NO: 67888 - DNA, 480 bp, Neisseria meningitidis
atgaaacacatactccccctgattgccgcatccgcactctgcatttcaaccgcttcggcacatcctgccagcgaaccgtccacccaaaacgaaaccgctatgaccacgcataccctcacctcaaaatacagttttgacgaaaccgtcagccgccttgaaaccgccataaaaagcaaagggatggacatttttgccgtcatcgaccatcaggaagccgcccgccgaaacggcttaacgatgcagccggcaaaagtcatcgtcttcggcacgcccaaagccggcacgccgctgatggtcaaagaccccgccttcgccctgcaactgcccctacgcgtcctcgttaccaaaacggacggcaaagtacgcgccgcctataccgatacgcgcgccctcatcgccggcagccgcatcggttttgacgaagtggcaaacactttggcaaacgccgaaaaactgatacaaaaaaccgtaggcgaataa

SEQ ID NO: 67889 - DNA, 282 bp, Neisseria meningitidis; identical to SEQ ID NO: 43821

SEQ ID NO: 67890 - DNA, 582 bp, Neisseria meningitidis; identical to SEQ ID NO: 41954

SEQ ID NO: 67891 - DNA, 837 bp, Neisseria meningitidis
atgatagacctgcactgccattccaccgtttccgacggtatgctctcccccaccgaagtcgtgcgcctcgcgcatcaaaacggctgcacgctgctggcgttgaccgatcacgaccacaccggcggcatcgccgaagcgcgtgccgaagccgacaggcttggtttgcgcctgattaacggtgtggaaatttccgtaacgtggcgcgggcgcacgatacacgttgtcggtttggatttcgacgagcaggacgaaaacctgcaaaacttgttggcgaaagtgcggcaaggccgtctgaaacgtcttgaagccatcgccgccaagctcgaaaagaaaggcatcggcggcgcatacgacggcgcgctggagttggcggcaaacaaagaaatggtcagccgcacccacgtcgccgagttcctcatcaaaaacggacatgtcaaaaacaagcagcaggcgttcaccaaatacttgggcgacggcaaatcctgcgccgtccgacacgaatgggcgacgctggaagactgcgtctccgccgtcaacggcgcgggcggcatggcagtcatcgcccaccccatgcgctacgatttgtccgccaccgccaagcgcaatctgtttgaagaatttaaaaacctcggcggcgcaggcatcgaagtccacagcggcaactgctgcaaaaacgaccgcctcaactacgcgcttttggcagaacgcttcggtatgctcgccagcgcgggcagcgacttccaccgtttaaacgactttagcggcggcatcctcggcgcgtgtcctgaactgccggaaaactgcaggccggtgtgggcgcatttttcccgacattga

SEQ ID NO: 67892 - DNA, 516 bp, Neisseria meningitidis
atgaaatcaaaactccccttaatcctaatcaacttttccctgatttcaagcccattgggtgcgaatgcggccaaaatctacacctgcacaatcaacggagaaaccgtttacaccaccaagccgtctaaaagctgccactcaaccgatttgcccccaatcggcaactacagcagcgaacgctatatcccaccccaaacgcccgaaccggtatcatcaccgtcaaacggcggacaggttgtcaaatataaagccccggtcaaaacagtatccaagccggcaaaatccaatacgccgccgccgcaacaagcaccctcaaacaacagcagacgctccattctcgaaacagaattgagcaacgaacgcaaagcattggttgaagcccaaaaaatgttatcacaagcacgtctggcaaagggcggcaacatcaaccatcaagaaataaatgcattacaaagcaatgtattggacaggcagcaaaatattcaagccctgcaaagggaactggggcgtatgtaa

SEQ ID NO: 67893 - DNA, 510 bp, Neisseria meningitidis
atgtacacttgcacttcctgcggcgaaaaacatgaagatatgcccgcaatcggctttaccgcccccgatccctataatcaactcagtgaagaagaacgcattgcttatcaagcagaatgcgattctgatttctgcatcatccgctatcccgaccaaaccgaccgctttatccgcgcggtgctgccgattccgattatcgggcatgaggaaacgctggaatatggcgtgtgggtgtccgtcagcgaaaagagttttaacgactatcaaagccactttcacgacaatccggaaaacgctgtttatttcggcatgatctgcaaccggctgcccccttatgaaaccgacaccttcggtctgcactgcaatgtcgttacccggtctaataaccaacgccccctgctgcaacttcatcaaagcggcgaacatccgctggtacgcgacttttaccaaggcatagaatacgctgaagcgcaggcaagggtagatgcggtattcggatcggattactaa

SEQ ID NO: 67894 - DNA, 639 bp, Neisseria meningitidis; identical to SEQ ID NO: 60906

SEQ ID NO: 67895 - DNA, 294 bp, Neisseria meningitidis
atgtcgaacattaaaattgtcgcactggttaccgtcaaaccggaatacacagaaacactggtagcacagtttaaagaactggtcaaagccagccgtgcagaagagggcaacatcagctacgatctccatcaggaaatcggcaaaccgaaccgttttgttttcgtggaaaattggaaatcccaagcagctattgacgaacataacgccagcgcgcatttccaagccttcgtccagtccgtcgacggcaaaaccgaagcgttggaaatcgtattgatgaatgaagttgccgattaa

SEQ ID NO: 67896 - DNA, 699 bp, Neisseria meningitidis
atgaaatccagacaccttgccctcggcgttgccgccctgttcgcccttgccgcgtgcgacagcaaagtccaaaccagcgtccccgccgacagcgcgcctgctgcttcggcagccgccgccccggcagggctggtcgaagggcaaaactatactgtcctttccaacccgattccccaacagcaggcaggcaaggttgaagtccttgagtttttcggctatttctgcccgcactgcgcccacctcgaacctgttttgagcaaacacgccaagtcttttaaagacgatatgtacctgcgtaccgagcatgtcgtctggcaaaaagagatgctgccgctcgcccgccttgccgccgccgtcgatatggctgccgccgacagcaaagatgtggcgaacagccatattttcgatgcgatggttaatcagagaattaagctgcaagagccggaagtcctcaaaaaatggctgggcgaacaaaccgcctttgacggcaaaaaagtccttgccgcttacgaatctcccgaaagccaggcgcgcgccgacaaaatgcaggagctgaccgaaaccttccaaatcgacggtacgcccacggttatcgtcggcggcaaatataaagtcgaatttgccgactgggagtccggtatgaacaccatcgaccttttggcggacaaagtacgcgaagaacaaaaagccgcgcagtaa

SEQ ID NO: 67897 - DNA, 942 bp, Neisseria meningitidis
atgaaaaccctgcttctcctcatccccctcgtcctaaccgcctgcggcacactgaccggcatacccgcccacggcggcggcaaacgctttgccgtcgaacaagaactcgtcgccgcatcgtcccgcgccgccgtcaaagaaatggatttgtccgccctgaaaggacgcaaagccgccctttacgtctccgttatgggcgaccaaggttcgggcaacataagcggcggacgctactctatcgacgcactgatacgcggcggctaccacaacaaccccgaaagtgccacccaatacagctaccccgcctacgacactaccgccaccaccaaatccgacgcgctctccagcgtaaccacttccacatcgcttttgaacgcccccgccgccgccctgacgaaaaacagcggacgcaaaggcgaacgctccgccggactgtccgtcaacggcacgggcgactaccgcaacgaaaccctgctcgccaatccccgcgacgtttccttcctgaccaacctcatccaaaccgtcttctacctgcgcggcatcgaagtcgtaccgcccgaatacgccgacaccgacgtattcgtaaccgtcgacgtattcggcaccgtccgcagccgtaccgaactgcacctctacaacgccgaaacccttaaagcccaaaccaagctcgaatatttcgccgtcgaccgcgacagccggaaactgctgattgcccctgaaaccgccgcctacgaatcccaataccaagaacaatacgccctctggatgggaccttacagcgtcggcaaaaccgtcaaagcctcagaccgcctgatggtcgatttctccgacatcaccccctacggcgacacaaccgcccaaaaccgtcccgacttcaaacaaaacaacggtaaaaaccccgatgtcggcaacgaagtcatccgccgccgcaaaggaggataa

SEQ ID NO: 67898 - DNA, 1155 bp, Neisseria meningitidis
atgactgaaactactcaaaccccgaccctcaaacctaaaaaatccgttgcgctttctggcgttgcggccggtaataccgctttgtgtaccgttggccgtactggcaacgatttgagctatcgcggttacgacattctggatttggcacaaaaatgcgagtttgaagaagtcgcccacctgctgattcacggccatctgcccaacaaattcgagctggccgcttataaaaccaagctcaaatccatgcgcggcctgcctatccgtgtgattaaagttttggaaagcctgcctgcacatacccatccgatggacgtaatgcgtaccggcgtatccatgctgggctgcgttcatcctgaacgtgaaagccatccggaaagtgaagcgcgcgacatcgccgacaaactgatcgccagcctcggcagcatcctcttgtactggtatcaatattcgcacaacggcaaacgcattgaggttgaaagcgacgaagagaccatcggcggtcatttcctgcaactgttgcacggcaaacgcccaagcgaatcacacatcaaagccatgcacgtttcactgattctgtatgccgaacacgagttcaacgcttctaccttcaccgcccgcgtgattgccggtacaggctctgatatgtactccagcattaccggagcaatcggcgcgttgaaaggtccgaaacacggcggcgcgaacgaagtggcttacgatattcaaaaacgctaccgcaatgccgacgaagccgaagccgatatccgcgaacgcatcggccgcaaagaaatcgtgatcggtttcggtcatccggtgtataccatttccgacccccgcaacgttgtcattaaagaagtggcacgcggtttgagcaaagaaaccggcgatatgcgcctctttgacattgccgaacgcttggaaagcgtgatgtgggaagagaaaaaaatgttcccgaatctggactggttctctgccgtttcctaccaaaaattgggcgtaccgaccgctatgttcacaccgctgttcgtaatttcccgtacaaccggttggagcgcacacgttcttgagcaacgcaaagacggcaaaatcatccgtccgagcgcgaactacacaggccctgaagatttggcgtttgtggagattgaagaacgataa

SEQ ID NO: 67899 - DNA, 867 bp, Neisseria meningitidis
atggcaggtgaaaccattaccgctgccgactacatcaagcaccacttgcagagcttgaccagtttgtcggatgttactcagggtcagggactgaaaaacattgctgatttttcgtttattaaccttgatgccgtcttttttgccgtcctgttgggcgtaatcggcagcttcctgttgtggcgcggtgcgaaaaaagcaacggcaggcgttcccggacgtttccaggccgcagtggaaatcttgtttgagtttgtggacgatatgtgtaagagcatcattcacaacgaaaagtctagaaaagccgtcgcgccgttgggtctgacgctgtttgtctggatttttctgatgaacgcgatggatatgctgccggtcgatttgctgccgatggtatggcagggcattaccggcaaccatcacgccctgctgcgcgtcgtaccgactgccgatttgaacaccactttggcactcgctgtcggcgtgttgctgatttgtatctattacaacatcaaaatcaaaggattgggcggctggtttcacgagttgttcagcgcgccgttcggtgcaaaactcgcacctgcgaactttctgttgaatttggtcgagtttctttctaaaaccgtatcccacggtatgcggttgttcggcaatatgtatgcgggcgaattggtattcttgctgatagccttgcttggcggtgcttgggcggcttccggcagcgtcgaagtcatggatccgattctgtttgtattccacattattgccggtttggcatgggcgattttccatattttggtgattaccctgcaggcgtttattttcatggcgttggcgttcgtctatatcggacaggcacatgatgcgcactga

SEQ ID NO: 67900 - DNA, 543 bp, Neisseria meningitidis
gtgcagagttggaaagaaaggcgcgatttcaatattgtaaagcaggatttggatttttcctgcggggcggcttcggtggcgacgcttttgaacaatttttacgggcaaacgctaacggaagaagaagtgttgaaaaagctggataaggagcagatgcgcgcgtcgtttgaggatatgcggcgcattatgccagatttgggttttgaagcgaaaggctatgccctgtctttcgagcagctcgcacagttgaaaatccccgtcatcgtgtatctgaaataccgcaaggatgatcatttctcggtattgcgcggtatagacggcaatacggttttgcttgccgacccgtcgctgggtcatgtttcgatgagcagggcgcagtttttggatgcttggcaaacccgtgagggaaatttggcaggtaagattttggcggttgtgccgaaagggagggatgccggcggggataaggcgtttttcacacgcagtccgaaacgtcagacggagtttgcggtcggacaggtaaaatggtggcgtgcttattga

SEQ ID NO: 67901 - DNA, 843 bp, Neisseria meningitidis
atggataaagaacgaattttaacccccgcagtcgtgttttccgtcgcactgctgcatttggcaatggtggcattgctctggcaggcgcacaagctgcccgtgatagagtcaggaaatgttatcgaatttgtcgatttgggtgattttggcggaggggacggtgcacccgaaggcgcaggtgcgcctgctgcgcctgagccgcaacctgagcctgagccgcccaaacctgtcgagccgcccaagccggttttgaagccggtggttacgaaaaaggcggatgcggatattcagcagcctaaggaagagccgaaacctgaagaaaagccgaaacccgaagaaaaaccgaaaccagagcctaagccggaagcgaagcctgtcccgaaaccggcggaaaaaccggtcgagaagccgtctgaaaaacctgccgaacatcccagcaatgcttctgccaaagcagacagcgagcagggtaatggggaagataagggaaccggtatcaaaggagacggaacggggcgcggagaaggcagcggtaaaggtagcggcggtgtcaaaggcgaacacggggaaggagccggcagcagcaaaggcaatcctttacgcgccaacggcagcattccgcgcccggcttatcccacgctttctatggagaatgacgagcagggtacggttgttttgagcgttttggtttctccgggcggtcatgtcgagtccgttaaaatcgtgaaaagcagtggtttttcccggttggacaatgcggcacgcaaggcggcgcaaaacgggcattttcaagccaatgcctggacggagtttaaagtccccgtcaagtttgaattgaattag

SEQ ID NO: 67902 - DNA, 360 bp, Neisseria meningitidis; identical to SEQ ID NO: 39361

SEQ ID NO: 67903 - DNA, 993 bp, Neisseria meningitidis
  misc_feature 974, 975, 976, 977, 978: 'n' is a, c, g or t
atgagcaccttctttcaacaaaccgcacaagccatgattgccaaacacatcgaccgtttcccgctattgaagttggaccaggtgattgattggcagccgatcgaacagtacctgaaccgtcaaaaaacccgttaccttcgagaccaccgcggccgtcccgcctatcccctgctgtccatgttcaaagccgtcctgctcggacaatggcacagcctctccgatcccgaactcgaacacagcctcattacccgcatcgatttcaacctgttttgccgttttgacgaactgagcatccccgattacagcaccttatgccgctaccgcaaccggctggcgcaagacaataccctgtctgaactgttggaactgattaaccgccaactgaccgaaaaaggtttaaaaatagagaaagcatccgctgccgtcgttgacgccaccattattcagaccgccggcagcaaacagcgtcaggccatagaagttgacgaagaaggacaaatcagcggccaaaccacaccgagtaaggacagcgatgcccgttggataaagaaaaacggcctctacaaactcggttacaaacaacatacccgtaccgatgaggaaggctatatcgagaaactgcacattactcccgccaatgcccatgagtgcacacacctgtcgccgttgttggaagggatagctgaaggtacgaccgtctatgccgacaaaggctatgacagtgcggaaaaccggcaacatctgaaagaacatcagttaccggacggcattatgcgcaaagcctgccgcaaccgtccgctgtcggaagtgcaaaccaaacgtaaccgatatttgtcgaagacccgttatgtggtcgaacaaagcttcggtacgctgcaccgtaagttccgctatgcgcgggcagcctatttcggactgattaaagtgagtgcgcaaagccacctgaaggcgatgtgtttgaacctgttgaaagnnnnncacacacttaattaa

SEQ ID NO: 67904 - DNA, 291 bp, Neisseria meningitidis; identical to SEQ ID NO: 66873

SEQ ID NO: 67905 - DNA, 435 bp, Neisseria meningitidis; identical to SEQ ID NO: 43451

SEQ ID NO: 67906 - DNA, 741 bp, Neisseria meningitidis; identical to SEQ ID NO: 39171

SEQ ID NO: 67907 - DNA, 240 bp, Neisseria meningitidis; identical to SEQ ID NO: 44857

SEQ ID NO: 67908 - DNA, 3246 bp, Neisseria meningitidis
atggctgccttcaaacctaatccaatcaactacatcctcggcctcgatatcggcatcgcatccgtcggctgggcgatggtagaaattgacgaagaagaaaaccccatccgcctgattgatttgggcgtgcgcgtatttgagcgtgccgaagtaccgaaaacaggcgactcccttgccatggcaaggcgtttggcgcgcagtgtccgccgcctgacccgccgtcgcgcccatcgcctgcttcgggcccgccgcctattgaaacgcgaaggcgtattacaagccgctgattttgacgaaaacggcttgatcaaatccttaccgaatacaccatggcaacttcgcgcagccgcattagaccgcaaactgacgcctttagagtggtcggcagtcttattgcatttaatcaaacaccgcggttatttgtcgcaaagaaaaaacgagggcgaaactgccgataaagagcttggcgctttgctcaaaggcgtagccgacaatgcccatgccttacagacaggcgatttccgcacaccggccgaattggctttaaataaatttgagaaagaatgcggccatatccgcaaccaacgcggcgattattcgcatacgttcagccgcaaagatttgcaggcggagctgaatttactgtttgaaaaacaaaaagaattcggcaatccgcatgtttcaggcggccttaaagaaggtattgaaaccctactgatgacgcaacgccctgccctgtccggcgatgccgttcaaaaaatgttggggcattgcaccttcgaaccggcagagccgaaagccgctaaaaacacctacacagccgaacgtttcatctggctgaccaagctgaacaacctgcgtattttagagcaaggcagcgagcggccattgaccgataccgaacgcgccacgcttatggacgagccatacagaaaatccaaactgacttacgcacaagcccgtaagctgctgagtttagaagataccgcctttttcaaaggcttgcgctatggtaaagacaatgccgaagcctcaacattgatggaaatgaaggcctaccataccatcagccgtgcactggaaaaagaaggattgaaagacaaaaaatccccattaaacctttctcccgaattacaagacgaaatcggcacggcattctccctgttcaaaaccgatgaagacattacaggccgtctgaaagaccgtatacagcccgaaatcttagaagcgctgttgaaacacatcagcttcgataagttcgtccaaatttccttgaaagcattgcgccgaattgtgcctctaatggaacaaggcaaacgttacgatgaagcctgcgccgaaatctacggagaccattacggcaagaagaatacggaagaaaagatttatctgccgccgattcccgccgacgaaatccgcaaccccgtcgtcttgcgcgccttatctcaagcacgtaaggtcattaacggcgtggtacgccgttacggctccccagctcgtatccatattgaaactgcaagggaagtaggtaaatcgtttaaagaccgcaaagaaattgagaaacgccaagaagaaaaccgcaaagacagggaaaaagccgccgccaaattccgagagtatttccccaattttgtcggagaacccaaatccaaagatattctgaaactgcgcctgtacgagcaacaacacggcaaatgcctgtattcgggcaaagaaatcaacttaggccgtctgaacgaaaaaggctatgtcgaaatcgaccatgccctgccgttctcgcgcacatgggacgacagtttcaacaataaagtactggtattgggcagcgaaaaccaaaacaaaggcaatcaaaccccttacgaatacttcaacggcaaagacaacagccgcgaatggcaggaatttaaagcgcgtgtcgaaaccagccgtttcccgcgcagtaaaaaacaacggattctgctgcaaaaattcgatgaagacggctttaaagaacgcaatctgaacgacacgcgctacgtcaaccgtttcctgtgtcaatttgttgccgaccgtatgcggctgacaggtaaaggcaagaaacgtgtctttgcatccaacggacaaattaccaatctgttgcgcggcttttggggattgcgcaaagtgcgtgcggaaaacgaccgccatcacgccttggacgccgtcgtcgttgcctgctcgaccgttgccatgcagcagaaaattacccgttttgtacgctataaagagatgaacgcgtttgacggtaaaaccatagacaaagaaacaggagaagtgctgcatcaaaaaacacacttcccacaaccttgggaatttttcgcacaagaagtcatgattcgcgtcttcggcaaaccggacggcaaacccgaattcgaagaagccgataccccagaaaaactgcgcacgttgcttgccgaaaaattatcatctcgccccgaagccgtacacgaatacgttacgccactgtttgtttcacgcgcgcccaatcggaagatgagcgggcaagggcatatggagaccgtcaaatccgccaaacgactggacgaaggcgtcagcgtgttgcgcgtaccgttaacacagttaaaactgaaagacttggaaaaaatggtcaatcgggagcgcgaacctaagctatacgaagcactgaaagcacggctggaagcacataaagacgatcctgccaaagcctttgccgagccgttttacaaatacgataaagcaggcaaccgcacccaacaggtaaaagccgtacgcgtagagcaagtacagaaaaccggcgtatgggtgcgcaaccataacggtattgccgacaacgcaaccatggtgcgcgtagatgtgtttgagaaaggcgacaagtattatctggtaccgatttacagttggcaggtagcgaaagggattttgccggatagggctgttgttgcttatgcagatgaagaggactggactgtaatagatgaaagcttcagatttaaatttgtactttattcgaatgatttaattaaagttcaacttaaaaaagacagctttttaggttacttttcaggattagatcgagccactggagccatttctcttcgggagcatgatttggaaaaatcaaaaggtaaagacggtatgcatcgtatcggcgttaaaaccgccctttcctttcaaaaataccaaatcgacgaaatgggcaaagaaatcagaccatgccgtctgaaaaaacgcccgcctgtccgttaa

SEQ ID NO: 67909 - DNA, 258 bp, Neisseria meningitidis
  misc_feature 235, 236, 237, 238, 239: 'n' is a, c, g or t
atgaaaaccctgctcctcctcatccccctcgtcctaaccgcctgcggcacactgaccggcattcccgcccacggcggcggcaaacgctttgccgtcgaacaagaactcgtcgccgcatcgtcccgcgccgccgtcaaagaaatggacttgtccgccctgaaaggacgcaaagccgccctttacgtctccgttatgggcgaccaaggttcgggcaacataagcggcggacgctacnnnnncacacacttaattaattaa

SEQ ID NO: 67910 - DNA, 606 bp, Neisseria meningitidis
atgaccatctatttcaaaaacggcttttacgacgacaccttgggcagcatccccgaaggcgcggttgccgtccgcgccgaagaatacgccgcccttttggcaggacaggcgcagggcgggcagattgccgcagattccgacggccgccccgttttaaccccgccgcgcccgtccgaataccacgaatgggacggcaagaaatgggaaatcggcgaagccgctgccgccgcccgtttcgccgaacaaaaaaccgccacggcattccgcctcgcggcaaaggcggacgaactcaaaaacagcctcttggcgggctatccccaagtggaaatcgacagcttttacaggcaggaaaaagaagccctcgcccggcaggcggacaacaacgccccgaccccgatgctggcgcaaatcgccgccgcaaggggcgtggaattggacgttttgattgaaaaagttgtcgaaaaatccgcccgcctggctgttgccgccggcgcgattatcggaaagcgtcagcagctcgaagacaaattgaacgccatcgaaaccgcgccaggattggacgcgctggaaaaggaaatcgaagaatggacgctaaacatcggctga

SEQ ID NO: 67911 - DNA, 387 bp, Neisseria meningitidis; identical to SEQ ID NO: 43778

SEQ ID NO: 67912 - DNA, 492 bp, Neisseria meningitidis; identical to SEQ ID NO: 39850

SEQ ID NO: 67913 - DNA, 573 bp, Neisseria meningitidis; identical to SEQ ID NO: 53316

SEQ ID NO: 67914 - DNA, 921 bp, Neisseria meningitidis
atgaaaatcaggctggggcggcacaacgcgcccgactttccgcacggggccgccgtaaccataggcaattttgacggcgtacacctcggacacaaacacatcctccaaaaactccgcttcgaagccgatacgcgcggattacctgtcgtggtcgtcattttcgaaccccaacccaaagaatttttcgcactccgcaccggcaggatgccgccgtgtcggatcagccccctgcgcaccaagctcgaattattggaaggcacaggctgtgtcgatgccgtctgggttttgcgtttcgatcaaaatttttccgaaatatccgcgcaagggtttatcgaccgcctgctgcgtcaaaccttgaatacgcgttatttgctcgtcggcgacgatttccgtttcggggcggggcgggaaggctgttttgaacttttggcacaacagcccgatatgcaaaccgagcgcacgccttccgttatcgtcgaggacatccgcaccagcagtaccgccgtgcgacaagccctttcagacggcaaccttgcctatgcgaaaaaacttttgggacacgactacgttttggggggcagagtggtgcacggcagaaaactcggacgcaccctaaacgccccgactgccaacatccgcctgcccggccaccgttatgccctcggcggcgtgtttgtcgtcgaagcggacggcgcattcggcacgcggcgcggcgtggcgagcttcggcttcaatcccaccgttgatagcggctgttctcaaaagcttgaagtccacctgttcgactttcaaggcgacctgtacggacaacggctgaacgtccgcttcctgcacaaactgcgcgatgaagaaaagtttgacggtatggaagaactgaaaaggcagattgaagccgatatggaagccgcaaagtgttggtag

SEQ ID NO: 67915 - DNA, 1542 bp, Neisseria meningitidis
atgaaaatcggtatcccacgcgagtcattatccggcgaaacccgtgtcgcctgcacgcccgccaccgttgccctgctgggcaaactgggctttgaaaccgttgtcgaaagcggcgcaggtttggcggcaagtttggacgatgccgcttaccaaacagcaggcgcaaccgttgccgacaaagcggcggtttgggcctgccctttaatttataaggttaacgcgccgtccgaagacgagctaccgctgctcaaagaaggacagaccatcgtcagcttcctgtggccgcgccaaaacgaggctttggtcgaagccttgcgcgccaagaaagtgaacgcgctggcgatggacatggtgccccgcatttcgcgcgcgcaggctttggacgctttgtcttcgatggcaaacatcagcggctaccgcgccgtaattgaagctgccaacgccttcggccgtttcttcaccggccaaatcaccgccgccggcaaagtgccgcccgcgcaggttttggtgattggcgcaggtgtggcaggtttggcggcgatcggtacggcaaactcgctcggcgcagtggtgcgcgcgttcgatacccgcttggaagtggcggaacaaatcgaatcgatgggcggcaagttcctgaaactcgacttcccacaagaatcgggcggcagcggagacggctacgccaaagtgatgagcgacgaatttatcgcagccgagatgaagctctttgccgagcaggcgaaagaagtggacatcatcatcaccaccgccgccattccgggcaaacccgcgcccaagctgattaccaaagaaatggtggaaagcatgaaatccggctccgtcatcgtcgatttggcggcggcgacgggcggcaactgcgaactcacccgcccgggcgaattgtccgtaaccggcaacggcgtgaaaatcatcggctacaccgacatggcaaaccgccttgccggacagtcttcccagctttacgccaccaacttggtcaacctgaccaagctgttaagcccgaacaaagacggcgaaatcacgttggacttcgaagacgtgattatccgcaacatgaccgttacccacgacggcgaaatcaccttcccgcctccgccgattcaagtttccgcccagccgcagcaaacgccgtctgaaaaagccgcgcctgccgccaagcccgagccgaaacctgtttccctgtggaaaaaactcgcgcccgccgtcatcgccgccgtattggtgctgtgggtcggcgcggtcgcacccgcagcattcctgaagcactttatcgtgttcgtccttgcctgcgtcatcggctactatgtcgtttggaacgtcagccactcgctgcacacaccgctgatgtcggtaaccaacgccatctccggcatcatcgtcgtcggcgcgctgctgcaaatcagccaaggcaacggtttcgttaccctgcttgccttcatcgccatcctgattgccagcatcaatatcttcggcggcttcttcgtaacgcgccgcatgttgaatatgtttaggaaaggataa

SEQ ID NO: 67916 - DNA, 2391 bp, Neisseria meningitidis
atgactgaacaaaaacacgaagaatacggcgccgacagcatccaggtgctcgaaggcttggaagcggtacgcaaacgccccggtatgtacatcggcgacacgcaggacggcagcggcctgcaccacatggtgttcgaagtattggacaacgccattgacgaagcactcgccggacattgcgacaaaatcaccgttaccatccacgccgaccattccgtcagcgtcgccgacaacgggcgcggtatgcccaccggcatccacccgaaagaaggacgctccgccgccgaagtcatcatgaccgtattgcacgcaggcggcaagttcgacaacaacagctacaaaatctccggcggcctgcacggcgtgggcgtgtccgtcgtcaacgcgctgtccgactgggtaacgctgaccatctaccgcgacggcaaagaacacttcgtccgcttcgtgcgcggcgaaaccgaagagccgttgaaggttgtcggcgattccgacaaaaaaggtacaaccgtacgcttcctcgccagcgcggaaaccttcggcaacgtcgaatacagcttcgacatcctcgccaaacgcatccgcgaactttccttcctgaacaacggcgtggacatcgaattgaccgacgaacgcgacggtaaacacgaaagcttcgccctttccggcggcgtggctggattcgtgcaatacatgaaccgcaaaaaaacgccgttgcacgaaaaaatcttctacgcgttcggcgaaaaagacggcatgagcgtcgaatgcgcgatgcaatggaatgacagctatcaagaaagcgtgcagtgtttcaccaacaacatcccgcaacgcgacggcggtacgcacctgaccgcgttgcgccaagtgatgacccgcaccatcaacaactatatcgaagccaacgaagtcgccaaaaaagccaaagtagaaaccgccggcgacgatatgcgcgaaggtttgacctgcgtgttgtccgtcaaactgcccgaccccaaattctcatcgcaaaccaaagacaaactggtttccagcgaaatcggccccgtcgtcaacgaagtcatcagccaagccctgaccgacttcctcgaagaaaatccgaacgaagccaaaatcatcaccggcaaaatcgtcgatgccgcccgcgcgcgcgaagccgcccgcaaagcacgcgaaatcacccgccgcaaaggcgtaatggacggcttggggctacccggtaaactcgccgactgccaagaaaaagaccctgccttgtccgagctttatctggtcgagggcgattccgcaggcggttccgccatgcaggggcgcgaccgcaaattccaagcgattttgccgcttaagggcaagattttgaacgtggaaaaggcgcgctttgaaaaaatgctcgccagtcaggaagtcgccgctttgattaccgccttgggcgcgggtatcggcaaggaagaattcaatgccgagaagctgcgttaccaccgcatcatcattatgaccgatgccgatgtggacggcgcgcacatccgcaccctgcttttgaccttcttctaccgccaaatgcccgaactggtcgagcgcggctacatctatatcgcccagccgcctttgtataaagcgaaatacggcaaacaggaacgttacctcaaggacgagttggaaaaagaccaatggctgctcggactcgccttggaaaaagccaaaatcgtttcagacggcaaagtgctggaggggaaagatttggaaagcgccgccaagcagttcctgctggcaaaaaccgttatcggacaggaaagccgcatcatcgatgatttggtgctcaaggcgatgctgtatgccgaacccgtcgatttgtcttcggcagatagcacagaccgcgccattgccaatctttccgccttgttggacgaaaaagaagtggtgttggaacgcgtggaaggacacgaaggcaaccgcttcatcaaaatcacgcgcaagctgcacggcaatgtgatgaccagctacctcgaatccaaattcctcaacagcaaagcctatcagaccattgttcagactgccaccgtgctgaaaggtttggttgcagccggttcgaccttgtttaagggcgaaaccgaatatcctgtcggcagctttgaagaagcgttggacatcctgttgcaaaacgtgcaaaagggtatgagcatccagcggtataaaggtttgggcgagatgaaccccgaacagctgtgggaaacgacgatggatccgtccgtgcgccgccttctgaaggtacgcattgaggacgccattgccgccgacgaagtgttcgttaccctgatgggcgacgaggtcgagccgcgccgtgcctttatcgaaaacaacgcgctgattgcccaaaatatcgatgcataa

SEQ ID NO: 67917 - DNA, 324 bp, Neisseria meningitidis; identical to SEQ ID NO: 37971

SEQ ID NO: 67918 - DNA, 432 bp, Neisseria meningitidis
ttgttgccgcgcccgctggtgtttaccaacggctgtttcgacatcctccacagggggcacgttacttatctggcgcaggcgcgttcgatgggggacgcgttggtgctggcgttgaataccgatgcttcggtgcggcgtctgggcaagggcggtgaccgcccggttaatcctttggagaaccgtgccgccgttgccgccgcgttggaaagtgtggatttggtaacgtggtttgacggggatacgccggcggcgttgattgaggcggtcaaacctgagattttggtcaagggcggcgattgggctgcggataagattgtcggtgcggcagaaacgttggcgcgcggcggtcaggtgttttcaattccgtttctgcaccagacttcgacaacgaagactttggcaaaaatccgtgcggcagagggcggaaaatga

SEQ ID NO: 67919 - DNA, 609 bp, Neisseria meningitidis
atgaaacccaaaccgcacaccgtccgcaccctgattgccgccattttcagccttgcccttagcggctgcgtcagcgcagtaatcggaagcgccgccgtcggcgcgaaatccgccgtcgaccgccgaaccaccggcgcgcaaaccgacgacaacgttatggcgttgcgtatcgaaaccaccgcccgctcctatctgcgccaaaacaaccaaaccaaaggctacacgccccaaatctccgttgtcggctacaaccgccacctgctgctgctcggacaagtcgccaccgaaggcgagaaacagttcgtcggtcagattgcacgttccgaacaggccaccgaaggcgtgtacaactacattaccgtcgcctccctgccgcgcactgccggcgacatcgccggcgacacttggaacacatccaaagtccgcgccacgctgttgggcatcagccccgccacacaggcgcgcgtcaaaatcgttacctacggcaacgtaacctacgttatgggcatcctcacccccgaagaacaggcgcagattacccaaaaagtcagcaccaccgtcggcgtacaaaaagtcatcaccctctaccaaaactacgtccaacgctga

SEQ ID NO: 67920 - DNA, 843 bp, Neisseria meningitidis
atgcaaaaccatgttatcagcttagcttccgccgcagaacgcagggcgcacattgccgataccttcggcaggcacgacattccgtttcagtttttcgacgcactgatgccgtctgaagaactgaatcgggtgatggcggaattggtgccgggattggcaaaacagcacctgttgagcgaagtggaaaaagcctgctttatgagccacgccgtattgtggaaacaggcattggatgaaggtctgccctatgttgccgtatttgaggatgatgtcctgcttggcaaagacgcagaaaagttccttgccgaagatacttggttggaagagcgttttgataaggattctgcctttatcgttcgtttggaaacgatgtttgcgaaagttattgtcagaccggataaagtcctgaattatgagaaccggtcatttcctttgctggagagcgaacattgggggacggctggctatatcatttcgcgtgaggcgatgcggtttttcttggaaaggtttgccgttttgccggcagagtggattaaagcggtagattggatgatgtttacttatttctttgataaggaggggatgcctgtttatcaggttaatcccgccttatgtacccaagaattgcattatgccaagttcctcagtaaaaacagtatgttgggtagcgatttggaaaaagatagggaacaagaaagaagacaccgccgttcgttgaaggtaatgtttgacttgaagcgtgctttgggtaaattcggtagggaaaagaagaaaagaatggagcgtcaaaggcaggcggagcttgagaaagcttacggcaggcgggtcatatcgttcaaatag

SEQ ID NO: 67921 - DNA, 210 bp, Neisseria meningitidis; identical to SEQ ID NO: 39816

SEQ ID NO: 67922 - DNA, 525 bp, Neisseria meningitidis; identical to SEQ ID NO: 45655

SEQ ID NO: 67923 - DNA, 309 bp, Neisseria meningitidis
atgagtgtaaaagaattattcaaagtcatcttagatggaaataaagattttcctattagaacgattcatcgtaccccgatggggatacttcccaaacctgttgctttaagtattgttcaatatgaagatgaccaaggattttatttgttttatttgaatgagactggtcaggaacaaacggatacttatcacgaaacattagattcggcatttgaacaggcggagtttgaatttggaatcagcaaagaagaatggatgcaaagtccttatgtagcaagcgtagaaaacaacaatcaaaaggtcatctga

SEQ ID NO: 67924 - DNA, 720 bp, Neisseria meningitidis; identical to SEQ ID NO: 50382

SEQ ID NO: 67925 - DNA, 327 bp, Neisseria meningitidis
atgaaaaaatccctgtttgccgctgctttgttgtctttggtcctggcagcctgcggcggtgaaaaagccgctgaagctcccgctaccgaagcacctgccgctgaagctcccgctactgaagcacctgccgctgaagctcccgctaccgaagcacctgccgctgaagctcccgctaccgaagcacctgccgccgaagctcccgctgctgaagctgccgctaccgaagctcccgctgctgaagctgccgctaccgaagcacctgccgctgaagctgccgctaccgaagcacctgccgctgaagctcctgctgccgaagctgcaaaataa

SEQ ID NO: 67926 - DNA, 1011 bp, Neisseria meningitidis
atgaacgacaacacgcaaacccttcctccccgccgcctgtccgtcgccccgatgttggactggacggacaggcactaccgttatatggcgcgccagattacccgcaatacttggctgcacagcgaaatggtcaacgccggcgcgattgtttacggcgacaaagaccgctttttgatgtttaacgaaggcgagcagcccgtcgccctgcaactgggcggcagcgacccgtccgatttggcgaaagccgccaaagccgccgaagaatacggctacaacgaggtcaacctcaactgcggctgccccagtccgcgcgtccagaaaggcgcgttcggcgcgtgtctgatgaacgaagtcgggctggttgccgactgcctcaacgccatgcaggatgcggtcaagattcccgttaccgtcaaacaccgcatcggtgtggacaggcagaccgaataccaaaccgttgccgatttcgtcggcacgctgcgcgacaaaaccgcctgcaaaacctttatcgtccacgcacgtaacgcgtggctggacggtctttcacccaaagaaaaccgcgacgttccgcccttgaaatacgattatgtttaccgcctcaagcaagagtttcccgggctggaaatcatcatcaacggcggcatcacgaccaatgaggaaatcgcgcaacacctgcaacacgttgacggcgtgatggtcgggcgcgaggcgtaccacaacccgatggtgatgcgcgaatgggacaggctgttttacggcgatacccgcagcccgattgaatacgccgatttggtgcagcgtctctacacatacagtcaagcccaaatccaagccggacgcggcacaatcttgcgccacatcgtccgccacagcctcgggctgatgcacggtctgaaaaatgcccgcacttggcggcgtatgctttccgatgcaacgctcttgaaagacaacgacggcggcctgattctcgaagcgtggaaagaagtcgaacgggcaaatatgcgcgaatag

SEQ ID NO: 67927 - DNA, 384 bp, Neisseria meningitidis
atgacttttgcctattggtgcatcctgattgcctgcttattgccgcttttttgtgcagcgtatgccaaaaaaaccggcggattccggtttaaagacaaccacaatccgcgcgattttctggcgcgcacgcaaggcacagccgcccgtgcccacgccgcgcagcaaaacggttttgaagcatttgcaccgtttgccgccgccgttttgacggcacacgcaaccggcaatgcggagcaatcgaccatcaacacgcttgccggcctgttcatcctgttccgcctcgcctttatctggtgctacatcgcagacaaagcagcattacgctcgctgatgtgggcgggcggatttgcctgcaccgtcggactgtttgtcgcggctgcttga

SEQ ID NO: 67928 - DNA, 570 bp, Neisseria meningitidis; identical to SEQ ID NO: 45306

SEQ ID NO: 67929 - DNA, 594 bp, Neisseria meningitidis; identical to SEQ ID NO: 61234

SEQ ID NO: 67930 - DNA, 696 bp, Neisseria meningitidis; identical to SEQ ID NO: 42672

SEQ ID NO: 67931 - DNA, 663 bp, Neisseria meningitidis; identical to SEQ ID NO: 41683

SEQ ID NO: 67932 - DNA, 729 bp, Neisseria meningitidis
atgtgggataatgccgaagcgatggaacggctgacgcgctggctgcttgtcatgatggcgatgctgcttgctgcgtccgggctggtttggttttacaattcgaatcatctgcccgtcaagcaggtgtcgctgaagggcaacctggtttattccgataagaagacattgggcagtttggcgaaagaatacatccatgggaatattttgaggacggacatcaatggcgcacaggaggcctaccgccggtatccgtggattgcgtcggtcatggtgcgccgccgttttcccgacacggttgaggtcgtcctgaccgagcgcaagccggtcgcgcgttggggcgaccatgccttggtggacggcgaaggcaatatttttgaagcccgcttggacagacccggaatgccggtattcagaggcgcggaaggaacgtctgccgaaatgctccgccgttatgacgaattttcgactgttttggcaaaacagggtttgggcatcaaagagatgacctatacggcacgttcggcgtggattgtcgttttggacaacggcatcaccgtcaggctcggacgggaaaacgagatgaaacgcctccggctttttaccgaagcgtggcagcatctgttgcgtaaaaataaaaatcggttatcctatgtggatatgaggtataaggacggattttcagtccgctatgcttccgacggtttacccgaaaaagaatccgaagaatag

SEQ ID NO: 67933 - DNA, 1254 bp, Neisseria meningitidis
atgcagacttacctcgtcggcggcgccgtccgcgattatcttttgggcttgcccgtcaaagaccgcgattgggtggtcgtcggcgcagacgcacaaaccatgctggcgcaaggcttccagccggtcggcaaagattttcccgtgtttctccatcccgaaacgcacgaagaatacgccctcgcccgcaccgagcgcaaaaccgccaaaggttacgtcggtttcagtttccacgccgacaaagacgttacgctggagcaggacttgatgcgccgcgacctgaccatcaacgcgatggcgcaagatgcggacggcaagattatcgaccctttcggcggacaacgggatttggcggcaggcattttgcgccacgtttccccggccttcgccgaagaccccgtccgcatcctgcgtactgcccgctttaccgcgcgttacaggtttgaaatcgccgaagaaaccataaagctgatgcggcagatggtggaaaacggcgaagcggacgcattggttgccgaacgcgtctggcaggagtttgcgaaaggtttgatggaaaaaaatccgcgcaaaatgattgaagtgttgcgcgaatgcggcgcgctcaaagtcttgctgcccgaagtcaatgccctcttcggcgtgccgcaacgcgccgactaccatcccgaaatcgacagcggcatccataccctgatgacgctgcaacgcgccgccgatatgggtttgagcctgcccgaacgctatgccgccctgctgcacgacttgggcaaagccaaaacaccgtccgacatcctgccgcgccaccacggacacgacctcgccggtgtcgaacccgtgcgcgaagtcaatcagcggctgcgtgcgccgaaacattgcgccgagcttgccgaattggtttgccgttggcacattattttccaccaagtcggacagcttaaaagccaaaccattctgaacgtattgaaaaaaaccgatgccttccgccgtcccgaacgctttcagacggcattgaacgtctgcattgccgacacgcaaggccgtctgaaccgcgaacacacgccctacccgcaacgcgcacactggttcgccctgctcgaagccgccaatcaggcggattcgggcaaaatcgccgccgaatgccgcgcgcagggaaaagcgcaccttatcgccgaacaaatcgaccgggcgcggctggcacaaatcgccccattgcaaaaaacgtttcgagcggcgcaagacaaaacagaaaaacattaa

SEQ ID NO: 67934 - DNA, 237 bp, Neisseria meningitidis; identical to SEQ ID NO: 37424

SEQ ID NO: 67935 - DNA, 126 bp, Neisseria meningitidis
atgcaggttctgtcttcactcaaaactgccaaacaacgccaccgcgactgccaaatcgtcagacgcaggggcaaagtttacgtcatctgcaaaagcaatccgcgttttaaagcgcgccaacgctga

SEQ ID NO: 67936 - DNA, 378 bp, Neisseria meningitidis
gtgaacaaaaccctcatcctcgccctttccgccctcctcggccttgccgcgtgcagtgccgaacgcgtttcactgttcccctcctacaaactcaaaatcatacagggcaacgaactcgaaccgcgcgccgttgccgccctccgccccggcatgaccaaagaccaagtcctgctcctgctcggcagccccatactgcgcgacgcattccctaccgaccgctgggactataccttcaacacctcccgcaacggcatcatcaaagaacgcagcaatctgaccgtctattttgaaaacggcgtactcgtccgcaccgaaggcgacgtcctgcaaaacgctgccgaagccctcaaagaccgccaaaacacagacaaaccataa

SEQ ID NO: 67937 - DNA, 321 bp, Neisseria meningitidis; identical to SEQ ID NO: 44453

SEQ ID NO: 67938 - DNA, 1662 bp, Neisseria meningitidis
atgactgacaacagccctcctccaaacggacacgcccaagcacgcgtccgcaaaaacaacaccttgctctccgccgtctggctggttccgctgatcgcgctgattgccggcggctggctttgggttaaggaaatccgcaacagggggcctgtggttacgctcttgatggacagcgcggaaggcattgaggtcaacaatacggtcatcaaagtattgagcatcgatgtcggacgcgttacccgaatcaaactgcgcgacgaccaaaaaggcgtggaagtaaccgcccaactcaatgcggacgtatccggcctcatccgcagcgatacccagttttgggtggtcaagccgcgtatcgaccaaagcggcgtaaccggtttgggtacgctgctttcgggttcgtacatcgcctttacacccggcaaaagcgacgaggcaaaagacgtgttccaagtgcaggacattccgcccgttaccgccatcgggcaaagcgggctgcgcttgaatttgattggtaaaaacgaccgcatcctcaacgtcaacagccctgttttgtatgaaaactttatggtcgggcaagtcgaaagcgcgcatttcgacccgtccgaccaaagcgtgcattacaccatcttcatccaaagccccaacgacaaactgattcattccgccagccgtttttggctggaaagcggcatcaatatcgaaaccacaggcagcggcatcaaactcaattccgcccctctgcctgccctgctgtcgggcgcgatttcatttgattcgccgaaaaccaaaaacagtaaaaacgtcaaaagcgaagacagcttcacgctttacgacagccgcagcgaagtcgccaacctgcctgacgaccgctcgctgtattacaccgcgtttttcaaacaatccgtgcgcggactgaccgtcggttcgcccgtcgagtacaaagggctgaatgtcggcgtggtttccgatgtcccttatttcgaccgcaacgacagcctgcatctgtttgaaaacggttggattcccgtacgcatccgcatcgagccttcccgtttggaaatcaatgccgacgagcaaagcaaagaacattggaaacaacaatttcagacggccttaaacaaaggcctgaccgccaccatctccagcaacaacctgctgaccggcagcaaaatgattgagttgaacgatcagccttcgtcttcgcccaagctgcgaccgcataccgtttatgcaggcgataccgtcattgccacacggggcggcggtttggacgacttgcaggcgaaagtggtggatttgctggacaagttcggcaaactgcctttggataagacggttgccgaattgaacggctcgcttgccgaactcaaatccgcactcaaatctgccaatactgctttaagctccatcgacaaactgatcggcaaaccgcagacgcaaaacattccgaacgagttgaaccaaaccctgaaagaattgcgtcaaaccctgcaaggcgtatcgcctcaatcgcctatctacggcgacgtacaaaatacgctgcaaagtttggacaaaaccttaaaagacgttcaacccgtgattaatactttgaaagaaaaacccaacgcgctgattttcaacagcagcagcaaagaccccatcccgaaaggaagccgataa

SEQ ID NO: 67939 - DNA, 489 bp, Neisseria meningitidis
atgctcaaaataaccctaattgcggcgtgtgcggaaaacctgtgcatcggggcgggcaatgctatgccttggcacatccccgaagatttcgcatttttcaaagcctataccttgggcaaacccgtcattatggggcggaaaacgtgggaatccctgcccgtcaaacccctgcccggacggaggaacatcgtcatcagccggcaggcggattattgcgcggcaggcgcggaaacggcggcaagtttggaggcggcattggcattgtgcgcaggcgcggaagaagccgtcattatgggcggcgcgcagatatacggacaagcgatgccattggcgaccgatttgcggataaccgaagtggatttgtctgtggaaggagatgcatttttccccgcaatagaccggacgcattggaaagaagcagagcggacggaacgccgtgtcagcagcaaaggcacgagctatgcttttgtgcattatttgagatattga

SEQ ID NO: 67940 - DNA, 402 bp, Neisseria meningitidis; identical to SEQ ID NO: 38334

SEQ ID NO: 67941 - DNA, 2115 bp, Neisseria meningitidis
atggatttattatcggttttccacaaataccgtctgaaatatgcggtggccgtgctgacgatactgcttttggcggcagtcgggctgcacgcttccgtctatcgcatcttcacacctgaaaacatccgcagccgcctccaacaaagcattgcacacacacaccggaaaatctcgtttgatgcggacattcagcgcaggctcctgccccggccgaccgtcatcctgaaaaacctgaccattaccgaacccggcggcgaccggactgccgtttccgtccaagaaaccaaaatcggattgagctggaaaaacctgtggtcggatcagatacagattgaaaaatgggtggtttcgagtgcggaacttgccctgacgcgcgacgggaaaggtgtttggaacattcaagacctgatcgacagccaaaaacgccaagcctcagtcaaccgcattatcgtcgaaaacagcaccgtccgcctcaatttcctgcaggaacagcttatcctgaaggaaatcaacctcaacctgcaatcccccgattcgtcggggcagccgtttgaaagttcgggcatactggtttggggaaagctgtccgtcccgtggaaaagcagggggctgttcctttcaaacggcatcggcccgcccgaaatctcaccgttccattttgaagcttccacttcgctggacggacacggcattaccatttccaccaccggcagcccttctgtccgcttcaacgccggcggagcggatgccgccggcctcggcctgcgtgcagacacttccttccgcaacctccacctgaccgcccaaatccctacgctggcactcaggaacaacagcattaaaattgaaaccgtcaacggcgcatttaccatcggcggcgaatatgcccgatgggacggttcgttcaaactcgacaaagccaacctgcactccggcatcgccaacatcggcaacgccgaaatctccggcagcttcaaaacaccgcgccaccagaccaacttctccctcaattcgccgctcgtatggacggaaaacaaagggctggaggcgccgcgcctgtatgtatcgacccttcaggataccgtcaaccgcctgccgcaaccccgtttcatcagccggctcgacggttcgctgtccgtaccgaatctgcaaaattggaatgccgaattaaacagcacattcgaccgccaaaccgttgccgcgaaattcagatacacacatgaagacgcaccgcatctggaagccgccgtcgcactgcaaaaattgaacctgaccccctatcttgacgacgtgcggcaacaaaacggcaaaatatttcccgacaccctcgccaagctgtccggcgacatcgaggcgcacctgaaaatcggaaaagtccaacttcccggcctgcaactggacgatatggaaacctacctccacgccgacaaaggccatatcgcgctcagccgtttcaagtcagggctttacggcggccataccgaaggcggcatcagcatcgccaacacccgtcccgccacttaccgcctgcaacagaatgcaagcaacatccaaatccaaccgctgctgcaagacctgttcggcttccacagcttcagcggcaacggcgacgcggtcatcgacctgaccgcgggcggcgaaacccgaaaagagcttatccgctcgcttcaaggcagcctgtcgctgaatatttccaatggcgcatggcacggtatcgacatggacaatatcctgaaaaacggcatttcgggcaaaactgccgacaatgccgcacccagcacacccttccaccgattcacgctcaacagcgaaatttcagacggcatcagccgccacatcgataccgaactcttctccgacagcctctatgttaccagcaacggctataccaatctggatacgcaggaattgtctgaagatgtccttatccgcaacgccgtccatccgaaaaacaaaccgattcccctgaaaatcaccggtacggtggacaagccgtccattaccgtcgattacggcaggctgaccggcggcatcaattcgcgcaaagagaaacagaaaatcctcgaagacaccctgctggaacaatggcagtggctcaaacctaaagaaccgtaa

SEQ ID NO: 67942 - DNA, 594 bp, Neisseria meningitidis
atggtgcgcacggttaaaagctacaacggcgaggccgacgatttggcggggcaaatccatacgctgcctgcggtttgggtaacgtatggcggcagcaaagttgagcctgccagcaccggcggcgtatgcggacgttatcaggataccgccgaatttgtggtgatggtggcggcccgcaatctgcgcaacgagcaggcgcagcggcaaggcggcatcgacagccgcgaaatcggcagcaacgatttaatccgcgctgttcgccgcctgcttgacggccagcggctcggttttgccgatagccgcggcttggtgcccaaagcggtgcgcgcgattgccaatcatgtgctggtgcaaaacgccgcagtaagcatatatgcggttgagtatgccatccgctttaacacctgcgggttggaaaatgaccgctaccccgaacacaccgacaatcccgacgaccccaaccatatctttaccaagtatcagggtacattgagcgagccgtggcctgatttcgaggggttggacggcaaaatttacgacccgcaatccgccgatgaaatacctgtaaacctaacccttaaggataagcaatga

SEQ ID NO: 67943 - DNA, 312 bp, Neisseria meningitidis
  misc_feature 297, 298, 299, 300, 301: 'n' is a, c, g or t
atgagcaccttcttccagcaaaccgcccaagccatgattgccaaacacatcgaccgcttcccgctattgaagttggaccaggtgattgattggcagccgatcgaacagtacctgaatcgtcaaagaacccgttacctccgagaccaccgcggccgtcccgcctaccccctgctgtccatgttcaaagccgtcctgctcggacaatggcacagcctctccgatcccgaactcgaacacagcctcatcacccgcatcgatttcaacctgttttgccgtttcgacgaactgagcatcccnnnnncacacacttaa

SEQ ID NO: 67944 - DNA, 1308 bp, Neisseria meningitidis
atgaagccagtaaacatcggtcttttaggtttgggtacggtcggcggcggtacggctgccgtgttgcgggacaacgcggaggaaatttcccgtcgcttggggcgcgaaatccgtatttctgccgtgtgcgatttgagtgaagaaaaagcccgacaaacctgcccgtccgcagcctttgtcaaagatccgttcgaactggtcgcacgtgaagacgtcgatgtcgtcgtcgaattgttcggcggtaccggcattgccaaagatgcggtgttgaaagccattgaaaacggcaaacacatcgttaccgccaacaaaaaactgctcgccgaatacggcaacgaaatcttcccgctggcggaagaaaaaaacgtcatggtgcaatttgaagcggcagtagcgggcggtatcccaatcatcaaagccctgcgcgaaggtttggcggcaaacaggattaaatccatcgccggcattattaacggcaccagcaacttcatcctctccgaaatgcgcgaaaaaggcagcgcgtttgccgatgtactgaaagaagcgcaggcattgggttatgccgaagccgatccgaccttcgacatcgaaggcaacgatgcgggccataaaatcaccatcatgagcgcactggcattcggcacgccgatgaacttttccgcctgctacctcgaaggcatcagcaaactcgacagccgcgacatcaaatacgccgaagaacttggctatcgcatcaaactgttgggcattacccgcaaaaccggcaaaggcatcgagctgcgcgtccaccctaccctgattcccgaaagccgcctcttggcaaacgtcaacggcgtgatgaacgccgtgcgcgtcaacgccgatatggttggcgaaaccttatattacggcgcgggcgcgggcgcattgccgaccgcttccgccgtggttgccgatatcatcgacatcgcccgcctggttgaagccgataccgcccaccgcgtaccgcatctggcgttccaacccgcgcaagtccaagcgcaaaccatcctgcctatggacgaaattaccagcagctactacctgcgtgtccaagccaaagacgaaccgggcacgctggggcaaatcgccgcgctgttggcacaagaaaacgtgtccatcgaagcactgattcaaaaaggcgtgattgatcagaccactgccgaaatcgtgattctgacccacagcacggtcgaaaaacacatcaagtcggcaatcgcagccatcgaagcactggattgcgtggaaaaaccgattaccatgatccgcatggaaagcctgcatgactga

SEQ ID NO: 67945 - DNA, 777 bp, Neisseria meningitidis; identical to SEQ ID NO: 45554

SEQ ID NO: 67946 - DNA, 942 bp, Neisseria meningitidis; identical to SEQ ID NO: 37828

SEQ ID NO: 67947 - DNA, 678 bp, Neisseria meningitidis
atgcctgctgctttgattaaagattttctgctgacccaaggtttaaagctaccgccagacgaggtacggacggcgtatctgaccgcaaagacggtgatggatatggggatggcttcaatagaccgttcggttttgtggcgcaatcatgagggttggaaacttgccgattatctgccgtgcgatgatggtcgcgaagacagcctgaaacggctttttatggctctggattcggtattctcgcgctcgacaggcgtgcggagtgcggcggtctatgccttgatgccatctgaaaaccaggctttccaactgatatgcctgtcccgacagggcgaggttttggaaaacctgtgggatttggatgaagcggcaggcaaggtttcgctggcttgccgttcggcgcaaagcggttggatgaatgttgcctcggatgtacgccgttggttggatttgggggagctttcgggagaacgcaatcatgcttcggcggcgcaaatttccattccggtctgcacggaaagtggcggtgtgttgggcgtggttcatgtggaatttgaatgcgcagagtgtgcggatgaggcagcgcaggcggaatgggtggctcttgccttggctttgtccgaacctttgaaactgctgttgggtatgtctgccggaaaagatgggagtgaagatgtctga

SEQ ID NO: 67948 - DNA, 207 bp, Neisseria meningitidis; identical to SEQ ID NO: 39219

SEQ ID NO: 67949 - DNA, 810 bp, Neisseria meningitidis; identical to SEQ ID NO: 59603

SEQ ID NO: 67950 - DNA, 1893 bp, Neisseria meningitidis
atgaagaaaatgaagcctgataaggcgcaaatgcagcaaatgagccgctttgccgtatttcagcgcgaaagtgttgatgttgaaaaacggacggtcgaagtggcgttttccagcgaagaatcggtacgccgttggttcggtgatgaagtattaagtcatgcgcagggtgctgttgacttaagccgcctgaacgacggcggcgcggtgttgttcaatcatgactgggacgaccaaatcggcatcatcgaacgtgcttggattgatgccgacaagcgcggccgtgccttggtacgttttggcaacggtacgaaggcaacggaaaaattccaagacgtgcaagacggcatcctacgccatatcagcgtcggctaccgagtggaggatatggtattggacaatcccgatactgacgatgagggctaccgttacatcgttacccgctggatgccgtatgaaatcagttttgtaaccgttcctgcagacccgacagtaggtgtaggcaggtcggtggaaccatttattgaaaaccctgtaaacccaacccctgaaaaaggaaatcgaaacatggataaaaatcaaacgcccactacggtggaaacttccgccgctgcaatccctgccgccgcagcaaccgataccaacaacaccgccgaacgcggtatgcagaacgaacgcgcgcgcgtttccgaactgctggccattggtcgcagttacgccgcccacggcggtatcgaagcagccgaaaaggttattaaagagggcggcagtgaagcacaattacgcgccgccatcatggcaaacatgcagacgaagccgaccgttaccgccggtgaaatcggcatgactgataaagaacagcgtgaattttcccttctccgcgccatgtctgccgccgcaaccggcaaatgggacaaagcgggcttggaacgcgaagtgtcggaagagttggaaaaacgacatggtcgcgcagcggcaggcttctttgtgccgactgatttgattgcccgcgcttacagcaaaggcaatgcggcaaacggcggcaacgtcatcgaaaacgacttccgcgaagacttgttcatcgaactgctgcgcaaccgacttgccgttgcccagttgggcgccaccgtactggacggcttggtcggcgacatcactattccgaaacacctgaccggaaacaccgttcaatgggtggatgaaaacggcagcgcgaccgaatcgaatgccactttcggacaaatgagcctgaaaccgaaaaccgttaccgccaatactgaattgagccgcaaattcattttgcaatcctcgctgtctgccgaacagttcgcccgcagcgaattattgaaagcgatgatgctgggtatcgatttggcggccatcaacggcaaaggtaccggcaacgaaccgaccggcatcctgaataccgccggcatcggcgcggtggaaatcggtgcgaacggcggtgcgcccgaatggaagcatatcgtcgctttggaaagtgccattgccgccgccaatgccgacatcggcgatttggcatacatcaccaatgcccgcgtccgcggtctgctgaaaaccaagctgaaggccgacggcgtgtccggctacatctggcaggacggcgcaacgccgttgaacggctaccgttgcgcggtatcaaaccaaattccgtccaacctgaccaaaggcacggcggccaacaaatgcagcccgctgatttttggtaactggtctgatttgatgattgcgcactggggcgttttggatgtgattgttgatccgtacaccaagtctactacgggcgcggtacgcatcaccacgttgcaagatgtggatattgccgtccgtcatgtcgaatcctttgccgccattaaagacatcgtggctgcttga

SEQ ID NO: 67951 - DNA, 768 bp, Neisseria meningitidis
  misc_feature 753, 754, 755, 756, 757: 'n' is a, c, g or t
atgcaggcagttgttgtgaataaaaatgtagcgggcgatgtggaagtagtcgaacgcgaggttcgcccgttggaatacggcgaggcgttggtcgaagtcgaatattgcggcgtgtgccacaccgacctgcacgttgcggcaggcgactacggcgacaaaccgggccgcgtgttgggacacgagggcatcggtttggttaaagaagttgccgacggtgtgaaaaatctgaaagtcggcgaccgcgtcagcatcgcctggctgttccaaagctgcggctcttgcgaatactgcaacaccggccgcgaaaccctgtgccgttccgtattgaacgcggggtacaccgccgacggcggtatggcgacccactgcatcgtcaatgcggattatgcggtcaaagtccccgacggactcgaccccgcccaagcgtccagcattacctgtgccggcgtgacctgctacaaagccgtgaaagtgtccggcgtgcgtccgggacagtggattgccatctacggcgcgggcggtttgggcaacttgggtgtccaatacgcgaaaaaagtattcggcgcgcacgttgccgccatcgacatcaacgatgaaaaactggcgtttgccaaagaaaccggcgcggatttgattgtcaacgccgccaaagaagacgctgccaaagtgattcaggaaaaaaccggcggcgcacacgctgcggtcgtaaccgccgtatctgctgccgcattcaactctgccgtggattgcgtnnnnncacacacttaa

SEQ ID NO: 67952 - DNA, 1680 bp, Neisseria meningitidis
atggaaaattttgctcagctgttggaagaaagctttaccctgcaagaaatgaacccgggtgaggtgattaccgctgaagtagtggcaatcgaccaaaacttcgttaccgtaaacgcaggtctgaaatcagaatccctgattgatgtagctgaattcaaaaacgctcaaggcgaaattgaagttaaagtcggcgacttcgttaccgttaccatcgaatccgtcgaaaacggcttcggcgaaaccaaactgtcccgcgaaaaagccaaacgcgctgccgattggattgccctggaagaagccatggaaaacggcaacatcctgtccggcatcatcaacggcaaagtcaaaggcggcctgaccgttatgattagcagcatccgcgcattcctgccgggttctttggtcgacgtacgtcctgtaaaagacacttctcacttcgaaggcaaagagatcgaattcaaagtgatcaaactggacaaaaaacgcaacaacgtcgttgtttcccgccgcgccgttctggaagccactttgggtgaagaacgcaaagccctgctggaaaacctgcaagaaggctccgtcatcaaaggcatcgttaaaaacattaccgattacggtgcattcgttgacttgggcggcatcgacggtctgttgcacatcaccgatttggcatggcggcgcgtgaaacacccgagcgaagtcttggaagtcggtcaggaagttgaagccaaagtattgaaattcgaccaagaaaaacaacgcgtttccttgggtatgaaacaactgggcgaagatccttggagcggtctgacccgccgttatccgcaaggcacccgcctgttcggcaaagtatccaacctgaccgactacggcgcattcgtcgaaatcgaacaaggcatcgaaggtttggtacacgtctccgaaatggactggaccaacaaaaacgtacacccgagcaaagtcgtacaactgggcgacgaagtcgaagtcatgattttggaaatcgacgaaggccgccgccgtatctctttgggtatgaaacaatgccaagccaatccttgggaagaatttgccgccaaccacaacaaaggcgacaaaatctccggtgcggttaaatccattaccgatttcggcgtattcgtcggcctgcccggcggcatcgacggtctggttcacctgtccgacctgtcctggaccgaatccggcgaagaagccgtacgcaaatacaaaaaaggcgaagaagtcgaagccgtcgtattggcaatcgacgtggaaaaagaacgcatctccttgggtatcaaacaactggaaggcgatccgttcggcaacttcatcagcgtgaacgacaaaggttctttggttaaaggttccgtgaaatctgttgacgccaaaggtgctgttatcgccctgtctgacgaagtagaaggctacctgcctgcttccgaatttgcagccgaccgcgttgaagatttgaccaccaaactgaaagaaggcgacgaagttgaagccgtcatcgttaccgttgaccgcaaaaaccgcagcatcaaactttccgttaaagccaaagatgccaaagaaagccgcgaagcactgaactccgtcaatgccgccgccaatgcgaatgccggcaccaccagcttgggcgacctgctgaaagccaaactctccggcgaacaagaataa

SEQ ID NO: 67953 - DNA, 1188 bp, Neisseria meningitidis
atgaataccttactcaagcagctcaaaccctatccctttgcccgactgcacgaggcgatgcagggcatttccgcgcctgaaggcatggaagccgtccccctgcacatcggcgaaccgaaacatccaacaccgaaagtcattacggatgcgctgaccgcctcattgcacgagttggaaaaatatccgctgacggccggtttgcctgaactgcgtcaggcgtgtgcgaactggttaaaacgccgttatgatgggttgacgctgaattccgacaccgaaattctgccggttttaggcagtagggaggcgttgttttcttttgtccaaaccgtgttgaaccctgtttcagacggcctcaaacccgcaattgtcagcccgaatcccttttatcagatttacgaaggtgcgacacttttgggcggcggtgaaatccattttgccaattgccccgcgccgtctttcaaccccgattggcgcagtatttccgaagaggtttggaaacgcaccaaactggtgttcgtctgctcgcccaacaaccccagtggcagcgtgctggatttggatggctggaaagaagtttttgatttgcaagacaaatatggtttcattattgcctcggatgaatgctattccgaaatctatttcgacggcaacaaacctttgggctgcctgcaagccgctgcacagttgggtcgaagcaggcaaaaactgcttatgttcaccagtttgtccaagcggtccaatgttccgggcctgcgttccggttttgtcgccggcgatgccgaactgcttaaaaactttctgctttaccgaacttatcacggcagcgcaatgagcattcccgtgcagcgtgccagtattgccgcctggaatgacgaacagcacgttattgacaaccgccgcctgtatcaggaaaagtttgaatgggttattcctatcctgcaacaggtatttgacgtcaaattaccggatgcctcgttttacatctggttgaaagtccccgatggcgacgatttggcatttgcacgcaatttatggcaaaaagccgctatccaagtattgcccggacgctttttggcacgggataccgaacagggcaatcccggggaaggttatgtgcgtatcgctttggtcaccgatgtcgcaacttgtgtcaaagctgcggaaaccattgtttccctatatcggtaa

SEQ ID NO: 67954 - DNA, 402 bp, Neisseria meningitidis
atgccgtctgatgtcggaatacggcttcagacggcatttaaacggaagttaaaaatgaaaaaaatattttattttctgatggttgttttttctacaagcgtatgggccggggatgcggaagacaatctgctcagcatccaatccggctatcgtgccttactgcaaaagcaaaacaatctggacggaaaaatcatcgggatgcagtcggatttggaagatgcgcgccggcgtttgcagacggctcaagcagacatcgcccgtttggaagcggaaattcctgcagcaatggcgcaaaaagcccggcaggctgaagagctgaggcaaatcggagtgcgtttggaccatgcttggaatgcggtttacggcgcaggggaacgaaggcgtcggggaattgaccgatga

SEQ ID NO: 67955 - DNA, 321 bp, Neisseria meningitidis; identical to SEQ ID NO: 43250

SEQ ID NO: 67956 - DNA, 462 bp, Neisseria meningitidis
atgtctgatttcccccccgtttcccgattccttgccgacgaagccgccacactcgatttgggcgcggcgtggtcttcccgtttaaacgcaccgctggtcatttatctcgaaggggatttgggtgcgggcaaaaccacgctgacacgcggcatcctgcgcggattgggtcatcagggcgcggtcaaaagcccgacctacgccatcgtcgaatcttatccgctggaacgcttcaccttgcaccatttcgacctctaccgcttctcgttccccgaagaatgggaagacgcggggcttgacgaactgtttgccgcaaacagcgtctgcctgatcgaatggccgcaacagggcggggaatttacgccgcccgccgacatcaccgcaacattgacacacgacggcgacggcagaaaatgcctgctgaccgcccataccgaacgaggacgcgaaagcctgccgctatga

SEQ ID NO: 67957 - DNA, 249 bp, Neisseria meningitidis
atgctgaccccggaacaagtaaaagccatgattgaaggcgtggcaaaatgcgaacatatcgaagtagaaggcgacggacaccattttttcgccgtcatcgtttcatcagaatttgaaggcaaggcacgccttgcacgccaccgcctgattaaagacgggcttaaagcccaactggaaagcaacgaactgcacgcactttccatttcggtagccgccacaccggcagaatggaatgccaaagcacaataa

SEQ ID NO: 67958 - DNA, 1464 bp, Neisseria meningitidis
atgcgtatcgtagaaaaagcctatactttcgacgatgttttgttggttcccgcacattcgaccgtgctgccgcgagacgttaaacttcaaaccaagctcacccgcgaaatcacgctcaacctccccctgctttccgccgcgatggacaccgttaccgaggcgcgcctcgccatttcgatggcacaggaaggcggcatcggcatcatccataaaaatatgccgcccgaaatgcaggcgcgcgccgtttccaaagtgaaacgccacgaaagcggcgtggtcaaagaccccgtaaccgttgcgccgacaacgctcatccgcgaagtcttggaaatgcgtgcgcagcgcaaacgcaaaatgtccggcctgcccgtcgttgaaaacggcaaagtcgtcggcatcgtaaccaaccgcgacctgcgttttgaaaaccgcgtcgatttgcccgtttccgccattatgaccccgcgcgaacgtctggttaccgtccccgaaggcacaagcatagacgaagcgcgcgaactgatgcacacgcacaaagtcgagcgcgttttggttctgaacgaaaaagacgaactcaaaggtctgattaccgtcaaagatattttaaaaaccaccgagtttcccaacgccaacaaagactccgaaggccgtctgcgcgtcggtgcggcagtcggcaccggcggcgacaccgaagagcgcgtaaaagcattggtagaagcaggagtcgatgtcatcgtcgtcgataccgcccacgggcacagccaaggcgtgatcgaccgcgtgaaatgggtgaaagaaacctatccgcacatccaagtcatcggcggcaacatcgccactgccaaagccgcattggatttggtcgccgccggcgcggatgccgtcaaagtcggtatcggtccgggatcgatttgcaccacccgtatcgtggcaggtgtcggcgtgccgcaactgaccgccattcacaacgttgccgaagccctcaaaggcacgggcgttccgctgattgccgacggcggcatccgcttctccggcgacatcgccaaagccctcgccgcaggcgcgtacagcgtcatgctcggcggtatgtttgcaggcacggaagaagcgccgggcgaaatcgaactctaccaaggccgctcgtacaaatcctatcgcggtatgggttccttgggcgcgatgagccaaggttctgccgaccgctacttccaagacaaaaccgacagcaccgacaaatacgtccctgaaggtatcgaaggccgcgtgccttacaaaggcccgatcgtgaatatcatccaccaactgaccggcggactgcgctccagcatggggtatttgggttgcgccaatattgctgaaatgcacgaaaaagccgaatttgtggaaatcacttccgcaggtatgagcgaatcgcacgttcacgacgttcaaattaccaaagaagcaccgaactaccatcgctga

SEQ ID NO: 67959 - DNA, 474 bp, Neisseria meningitidis; identical to SEQ ID NO: 47715

SEQ ID NO: 67960 - DNA, 648 bp, Neisseria meningitidis
atgaaaacaaaattttacaatcatcaaggcggacatttaatcctgtattttgcaggttggggaacgccgcccgatgctgtaaatcatttgattttgccggaaaatcacgatttattgatttgctatgattatcaagatttaaatttggattttgatttttccgcctatcggcacatccgcttggtggcgtggtcaatgggcgtttgggcggcagagagggcattgcaaggaataagattaaaatccgcaacggcagtgaatggcacaggtttgccttgcgatgataatttcggtatcccttgcgccgtttttaaaggcacattggagaacctcacggaaaatacccgtttaaaatttgaacgcagaatgtgtggcgataaagcatcttttgaagattaccaacaattttccgcccgtccgtttgacgaaattcatcaagaacttatcgcactttttgcgatgatcgggcaagataggcgcgcagattttatccgctggacaaatgccttggtcggatcgggcgataaaatttttatgcctgccaatcagcaccgatattggacaccgcgttgcaccgttcgggaaattgacggcggacattacctgttttcaagattcacccattggtcggcactatggaatcactga

SEQ ID NO: 67961 - DNA, 624 bp, Neisseria meningitidis
gtgcttcgtagggataacgacaataaaaccttattcctgaccgattacaagcgatccgacggatcgggcaataagggctgggtagtgaaattgaaggacggacagcgcgttaccgtcaaaccgaccgtggtattgcgtaccgcctttgtaaccatccataaatatacgggtacggacaaatgcggcgcggaaaccgccattttgggcatcaataccgccgacggcggcaagctgaccaagaaaagcgcgcgcccgattgtgccggaagccaatacggctgtcgcgcaatattccggccataagaaaggcaccaacggcaaatccatccctataggttgtatgcaaaaaagcaatgaaatcgtctgcccgaacggatatgtttacgacaaaccggttaatgtgcgttatctggatgaaaagaaaacagacggattttcaacaacggcagacggcgatgcgggcggcagcggtatagaccccgacggcaagcgttccggcaaaaacaaccgctgcttctcccaaaaaggggtgcgcaccctgctgatgaacgatttggacagcttggacattaccggcccgacgtgcggtatgaaacgaatcagctggcgtgaagtcttctactga

SEQ ID NO: 67962 - DNA, 1305 bp, Neisseria meningitidis
atgaaaaaacacatatgggcggcatctttgctgccggcatccctatcggcagaacctttaaactggtggaagccttattccgccgtcaattcgggcgataccgcctgggtgatgactgcggctgccttggtactgttgatgacgcttcccgggctggctttattctacggcgggatggtgcggaaaaaaaacctgctctcgacgatgatgcacagcttttccatcgcgacattggtgggcatcctttgggtcgccgtcggctattctttagcgttcacgccgggaaatgcctttatcggcggtttggggcgcgtatttttaagcgggatgcagatagacgctgccgcacagatgctgaccgtgtcgcccaatgcgccgactgttcccgaaccggtatttatgttttttcagatgacgtttgccattatttcgaccgccattattaccggcgcgtttgccgaacggatgaaatattcggcaatgatgctgttttcgggcatatggtttttattggtttatgtgccgggagcgcattgggtgtggggcggcggctttatgagcaagggcggcgtattggattatgccggcggtacggtggtgcacatcaatgccggtatcgcgggactcgtcgccgccttggttttgggcaggcgcataggctacgggcgcgaggcgatgcctccgcacaatatggcgatgacactgatcggcgcggcaatgttgtggttcggctggttcggctttaacgccggatcggcgcttgcggcagacgcggcggcgggtatggcgatggcggtaacgcaggtgtcggccgtattcggcgcggcaggctggcttgcctgcgaaaaaatagcgggacacaaaccttccgctttggggctggcttccggcgcggtttccggtctggtcggcatcacccctgccgccggctttaccggcccgtcgggcgcggccgccatcggtatattgactgccgccgcgtgctttgtgtccgtcaccgtcgtcaaacacaaattgcgttacgatgattctttggacgctttcggcatacacggattcggcgggctggtgggcggaatattgaccggcatctttttcgacaaccgcattttcggcggggatgcggcagtttggcagcagttgtggatacaggtaaaagacgggttcgttatggcggcatacagcgggctgatgagttgggcgattttgaaggtcgtggggaaaatctgcggcggcctgcgcgtcggcaaggatgtcgaacgcgaaggtttggatctgaatatccacggcgaacgcgtggaataa

SEQ ID NO: 67963 - DNA, 693 bp, Neisseria meningitidis
atgggacaaaagattaaccctacaggctttcgcctggcggtaactaaagactgggcttcaaaatggtttgctaaaagcaccgacttttctactgttttgaagcaggatatcgatgttcgcaattatttgcgtcaaaaattggccaatgcttcggttggtcgagtggttattgaacgccctgcaaaatctgcacgcattaccattcactccgctcgtccgggtgtggttatcggtaaaaaaggtgaggatatcgaggttttgaaacgtgacttgcaagtcttgatgggtgtacctgttcatgtaaatattgaagagattcgccgtcctgagttggatgctcaaattattgctgacggtattgcccagcagttggaaaagcgcgttcaattccgtcgtgctatgaaacgagcaatgcaaaatgcaatgcgttctggtgctaaaggtattaagattatgacttcaggccgtctgaatggtgcggatattgcccgtagcgaatggtatcgtgaaggtcgcgtgccactgcatactttacgtgcaaatgtagattatgcaaccagcgaagcgcacaccacatatggtgtattgggtctgaaagtttgggtttatacggaaggcaatattaaatcttccaaacctgaacatgagagtaaacaaagaaaggcaggtagacgtaatgctgcagccaactag

SEQ ID NO: 67964 - DNA, 864 bp, Neisseria meningitidis; identical to SEQ ID NO: 37982

SEQ ID NO: 67965 - DNA, 378 bp, Neisseria meningitidis; identical to SEQ ID NO: 37228

SEQ ID NO: 67966 - DNA, 132 bp, Neisseria meningitidis; identical to SEQ ID NO: 38518

SEQ ID NO: 67967 - DNA, 942 bp, Neisseria meningitidis; identical to SEQ ID NO: 38511

SEQ ID NO: 67968 - DNA, 2298 bp, Neisseria meningitidis; identical to SEQ ID NO: 64640

SEQ ID NO: 67969 - DNA, 123 bp, Neisseria meningitidis; identical to SEQ ID NO: 38799

SEQ ID NO: 67970 - DNA, 381 bp, Neisseria meningitidis
atgaatatcaggtttttcgcgctgaccgtaccggttttgtctttggcggcctgtgccgtgccggaggcgtatgatgacggcggacgcgggcatatgccgtccgttcaaaaccaagcccgcccggcagattttcgggcgttttcatgcgagaacggtttgtctgtgcgcgtccgccatttggacagcggcaaagtcgcgttgcggctggacggcaggcgtgccgtcctctcttccgacgttgccgcatccggcgaacgctataccgccgaacacggtttgttcggaaacgcaaccgagtggcaccagaaaggcggcgaagcctttttcggctttaccgatgcctacggcaattcggtcgaaacctcctgccgcgcccgctaa

SEQ ID NO: 67971 - DNA, 1458 bp, Neisseria meningitidis
atgtcccggcatcccgcccccaccggagaaaaaacattcttcggccaccccttccagctttccaccctcttccatatcgaattgtgggaacgtttttcattttacggaatgcagggcatcctgctgatttacctctactacaccgccgacaaaggcggcttgggcatagacaaaaccctcgccggcggcattgtcggcgcatacagcggcagcgtgtacctgtccaccattttgggggcgtggtttgccgaccgagtatggggtgcggaaaaaaccctcttcctctcgggcatcgtcgtgatgctcggacacatcgtccttgccgccgccccgggcctgtacggccttttaatcgggctgatattcatcgcattgggcagcggcggcgtgaaatctacggccagttctatggtgggcgcattatacgaacaggacgaaatgcgcccgctgcgcgatgcgggattttccattttctacatcgccatcaatatcggcggcttcctaggcccgctgctgaccggcctgctgcaggaaaacatcggtttccattatggtttcggcgcggcggcagtcggtatggcattcggcttgtggcgttattccttgggacgtaaaaacctgccccatcccatcgtcccccatccgctttcaaaaggacagggcaaaactgcggccgccgtcggcattgctctcatcgccgcacttgcaaccgccatcaaaaccgggcttgtcaacctcgacaatttctccggcatcctcttatctaccgtcatccttgccgtcattgcctattttgcccgcctgctgactaatccccgcgtcagttccgacaacaaacggcacatcatcgcctacatcccgcttttcctgaccatctgtatgttttgggccgtctggtttcagatttacaccgtagcaaccgtctatttcgacgaaaccgtcaaccgcaccatcggttcgtttaccgtgcccgtcgcctggaaagattccatgcaaagcctgtgggtcatcctgttttccggactgatggcggcaatgtggacaaaaatggggcgcaaacagcccaaaaccccgctgaaattcgctatggcggtatttgttaccggcgcgtcgtttttgggattcgtcccctttatttccgccggcacgccgatgcctattgcggttttcgcactgattgtccttgccatcacgataggcgaactgatgatttccccgattgcgctgtccatctccaccaaaatcgcaccgcctttattcaaaacccaaatggtcgcccttaatttccttgccttttcattaggcttcactttgggcggcgtattgtttgaaaaatgctatcaggcgggcgacgaaatcggcttctatcggctgctgttctacatcggcgcagccacaggcttcctgctgctcctgctcgtccccaaattgaacaaaatgctcgaaggcacagactaa

SEQ ID NO: 67972 - DNA, 1815 bp, Neisseria meningitidis
atgagtgaacacgatatgcagaacacaaatccgccattaccgcctctgccgcccgaaatcacgcagctcctgtcggggctggacgcggcacaatgggcgtggctgtccggctacgcttgggcaaaagcaggaaacggggcatctgcaggactgcccgcgcttcagacggcattgccgacggcagaacctttttccgtaaccgtcctttccgcctcgcaaaccggcaatgcgaaatccgttgccgacaaagcggcggacagcctggaagccgccggcatccaagtcagtcgcgccgaactgaaagactataaggcgaaaaacatcgccggcgaacgccgcctgctgctggttacgtccacccaaggcgaaggcgaaccgccggaagaagccgtcgtgctgcacaaactgctgaacggcaaaaaagccccgaaattggacaaactccaatttgccgtactgggtttgggcgacagttcctatccgaatttctgccgggcgggcaaagatttcgacaaacgttttgaagaattgggggcgaaacgcctgctcgaacgcgttgatgcggatttggactttaccgcctccgcaaacgcctggacagacaatatcgccgcactcttaaaagaagaagccgcaaaaaaccgggcaacgcccgcgccgcaggcaacgccccccgccggccttcagacggcatcggagggcaggtactgcaaggcagacccctttcccgccgccctgctggccaatcagaaaatcaccgcccgccaatccgataaagacgtgcgccacatcgaaatcgatttgagcggttcggatttgcactacctcccgggcgacgcgctcggcgtttggtttgacaacgatccggcactggtcagggaaatcctagacctgctcggcatcgatccggcaacggaaatacaggcgggcggaaaaaccctgccggttgcctccgcactgttatcccattttgaactcacgcaaaacacccccgcctttgtcaaaggctatgccccgttcgccgatgatgacgaactcgaccgtattgctgccgacaacgccgttttgcaaggctttgtgcaaagcacgccgattgccgatgtgctgcaccgcttcccggcaaaactgacggcggaacaattcgccggcctgctgcgcccacttgcgccgcgcctgtattcgatttcctcgtcgcaggcggaagtgggggacgaagtgcacctgaccgtcggcgcggtgcgttttgaacacgaagggcgcgccagggcgggcggcgcatcgggtttccttgccgaccggctgaaagaggacggcacggtgcgcgtgtttgtggaacgcaacgacggcttcaggctgcccgaagacagccgcaagccgattgtgatgatcggctcgggcaccggcgtcgcaccgttccgcgctttcgtccaacaacgtgccgcagaaaatgcggaaggcaaaaactggctgattttcggcaatccgcattttgccgccgacttcctctatcagaccgaatggcagcagtttgccaaagacggcttcctgcacagatacgatttcgcctggtcgcgcgatcaggaagaaaaaatctatgtgcaggacaaaatccgcgaacaggcggaaggactttggcaatggctgcaggaaggcgcgcatatctatgtgtgcggcgatgcggcaaaaatggcaaaagacgtggaagccgccttgctggatgtgattatcggggcaggacatttggacgaagagggcgcagaagaatatttggatatgctgcgcgaagaaaaacgctatcagcgtgatgtttattga

SEQ ID NO: 67973 - DNA, 309 bp, Neisseria meningitidis
atggaatattgcgaacctgaagaagcatccgacccgtacgcaacatacaggcgtgccaacctgatggcgggtctgccgctgtttgtcgtgattttggttctgctcaatattgtttttccgcttccggcgtatccattggcttggctggtgcctgcaggtttcatggttttgggcggcggctttcccttatcgctgccgcttgcggtgctgcttgtcctgacctgctgcattctggcgcgttgtccgccattatcccgtcttttgtgctgcccttgcccgaatcatccgatgtctaaaaattctgcctga

SEQ ID NO: 67974 - DNA, 852 bp, Neisseria meningitidis
atggcacgacacggttggcaggcaggacggtttgaaatcggtttggacaagccgaaaattatgggcatcgtgaatctcacgcctgattctttttccgacggcggcgcgtattcgcaaaatgccaaaaccgctttggcgcacgccgaacggcttttgaaagagggtgcggacattctcgacattggcggcgaatcgacgcggccgggtgcggattatgtttcgtccgaagaagaatgggcgcgagttgagcctgtattggcagaagtggcggggtggggcgttcccgtcagtttggacacgcgccgcacggtgattatggaaaaagcgttggcactcggtggcatcgatattattaacgatgtggcggcgttgagcgatgaaggcgcggtcgaattgctggcgcgccagacggacacgggcatttgcctgatgcatatgcggggcttgcccgaaaccatgcaggacaatccgaaatatcaggatgtggtcggcgaagtggcacgttatctgaaaacacggtcagaagcctgtgttgcggcaggcatcgccccgcaacgcatcacactcgaccccggtttcggcttcggcaaaaccctgcaacacaatatcgcactgatgcggcatttacccgaattgatggcagaaacaggctttccgctgcttatcggcgtatcgcgcaaacgcatgataggcgagctgaccggcgaaaccgacacggcggcgcgcgtacacggcagcgtggcggcggcactggcttccgtggcgcgcggcgcgcaaatcgtgcgggtgcatgatgtgaaggcgacggcggatgcgttgaaggcatgggaagcgttgggcatcaatctgtaa

SEQ ID NO: 67975 - DNA, 738 bp, Neisseria meningitidis
atgttaagcgcgcgctacctccacctgcacgaagctttgggtttgggcccgatgtggctgaaacagaccgctgtcgtcctgccgcccaaaaacacacccgcaccctcggcacaggcacgtcctcaaaccgtccgcgccgccccgatccgcccttcccaaccccataacggtcaggcacggctcgaaacgatgaaagcgttggaaaccgccgccgtacatacgcgcaaacccgcgcctgaaaccgaaacgcctctgcccggcctttcagacggcatcgcccccgttcccgccgcttcgggcatcaccaagcttgccgtcgtcagcctttgcccaccgatcgaggatgcggtttacgggcaactgttccacggcaaagcaggtgttctgcttgacaacatactcaaagccgtaggactggatgccgcttatgtccacaaaacctgttgggtgaaaaccgccgctgtcggcaacccgatgccgtctgaagcggcaatcgaaaccgcgacggtttccgtcatgcaggaactcgacggctgccgcgcccccgccgtcctattcctcggacaggcttttgtcaacccggaacggcaggcgatgattgaaactttgtgcggcagccgtcccttcttcatcatcgaccatcccgcccggctgttgcgccaacccgaacttaaagcccgcgcctggcaggtgttgaaacagttgaaacgcgccttgcggcaaggcggcggcagttga

SEQ ID NO: 67976 - DNA, 1224 bp, Neisseria meningitidis
atgtcgggcaatgcctcctctccttcatcttcctccgccatcgggctgatttggttcggcgcggcggtatcgattgccgaaatcagcacgggtacgctgcttgcgcctttgggctggcagcgcggtctggcggctctacttttgggtcatgccgtcggcggcgcgctgttttttgcggcggcgtatatcggcgcactgaccggacgcagctcgatggaaagcgtgcgcctgtcgttcggcaaacgcggttcagtgctgttttccgtggcgaatatgctgcaactggccggctggacggcggtgatgatttacgccggcgcaacggtcagctccgctttgggcaaagtgttgtgggacggcgaatcttttgtctggtgggcattggcaaacggcgcgctgattgtgctgtggctggttttcggcgcacgcaaaacaggcgggctgaaaaccgtttcgatgctgctgatgctgttggcggttctgtggctgagtgccgaagtcttttccacggcaggcagcaccgccgcacaggtttcagacggcatgagtttcggaacggcagtcgagctgtccgccgtgatgccgctttcctggctgccgcttgccgccgactacacgcgccacgcgcgccgcccgtttgcggcaaccctgacggcaacgctcgcctacacgctgaccggctgctggatgtatgccttgggtttggcagcggcgttgttcaccggagaaaccgacgtggcaaaaatcctgctgggcgcaggtttgggtgcggcaggcattttggcggtcgtcctctccaccgttaccacaacgtttctcgatgcctattccgccggcgcgagtgcgaacaacatttccgcgcgttttgcggaaacacccgtcgctgtcggcgttaccctgatcggcacggtgcttgccgtcatgctgcccgttaccgaatatgaaaacttcctactgcttatcggctcggtatttgcgccgatggcggcggttttgattgccgactttttcgtcttgaaacagcgtgaggagattgaaggctttgactttgccggactggttctgtggcttgcgggcttcatcctctaccgcttcctgctctcgtccggctgggaaagcagcatcggtctgaccgcccccgtaatgtctgccgttgccattgccaccgtatcggtacgccttttctttaaaaaaacccaatctttacaaaggaacccgtcatga

SEQ ID NO: 67977 - DNA, 207 bp, Neisseria meningitidis; identical to SEQ ID NO: 43230

SEQ ID NO: 67978 - DNA, 810 bp, Neisseria meningitidis
atgacaccgctcaaaatcgccatcgccggcgcaaacggccgtatgggacgcgtattggttgaagccgtcaacaaccatcccgacaccgtcctttccggcgcgctcgaacactcgggctcagaagccctcgggctggacgcaggctacgccgtcggactcaaaaccggcatcgccatttcagacgacgttgacgccgttctcgcacaaagcgacgtactcatcgacttcacccgccccgagcccaccctcaaacacctgcaaaaatgcgttgaaaaacaagtcaacatcatcatcggcacaacaggcttcgacgatgcgggcaaagccgctatccacactgccgccgaacaaacaggcatcgttttcgccgccaacttcagcgtcggcgtcaacctcaccttccacatcctcgacaccgtcgcacgcgtattaaacgaaggctacgacatcgaaatcattgaaggccaccaccgccacaaagtcgatgcccccagcggcaccgcgttacgcatgggcgaagtcatcgccggcgcgctcggcagagacctcaaacaatgcgccgtttacggccgcgaaggccacaccggtccgcgcgatccgtcgaccatcggctttgccaccgtccgcgcaggcgacatcgtcggcgaccacaccgccctcttcgccaccgacggcgagcgcgtggaaatcacccacaaggccagcagccgcatgacctttgccgccggtgccgtccgcgccgcagtttgggtcaacggcaaaacgggtttgtacgatatgcaggacgtactcgggctgaacaaccgttaa

SEQ ID NO: 67979 - DNA, 528 bp, Neisseria meningitidis
  misc_feature 505, 506, 507, 508, 509: 'n' is a, c, g or t
ttggatctctacaaactcggttacaaacaacatacccgtaccgatgcggaaggctatatcgagaaactgcacattacccccgccaatgctcatgagtgcaaacacctgtcgccgttgttagaagggatagctgaaggtacgaccgtctatgccgacaaaggctatgacagtgcggaaaaccggcaacatctggaagaacatcagttgttagacggcattatgcgcaaagcctgccgcaaccgtccgctgacggaaacgcaaaccaaacgcaaccggtatttgtcgaagacccgttatagtggattaaatttaaatcaggacaaggcgacgaagccgcagacagtacaaatagtacggcaaggcgaggcaacgccgtactggtttaaatttaatccactatatgtggtcgaacagagcttcggtacgctgcaccgtaaattccgctatgcgcgggcagcctatttcggactgattaaagtgagtgcgcaaagccatctgaaggcgnnnnncacacacttaattaattaa

SEQ ID NO: 67980 - DNA, 1887 bp, Neisseria meningitidis
atgatttaccccaaaacctacgacgttatcgtcgtcggcggcggacacgccggcacagaagccgcgctcgccgccgcccgtatgggcgcgcagacgcttttgctcacacacaatattgaaacgctcggacaaatgtcgtgcaacccttccatcggcggcatcggcaaagggcatttggtgcgcgaactcgacgcgctcggcggcgcgatggcgttggcaaccgacaaatccggcatccagttccgccgtctgaacgccagcaaaggcgcggcagtacgggccacgcgcgcgcaggcggatcgtatcctatataaagccgccatccgcgaaatgttggaaaaccaagaaaacctcgaccttttccaacaagccgtcgaagacgtaacgctcgatggcgaccgcatttcaggcgtaatcaccgcgatgggcgtggagtttaaagcacgcgccgtggtgttgaccgcaggcacgtttttgtccggcaaaatccacatcggtttggaaaactacgagggcggacgcgccggcgaccccgccgccaaatcgctgggcggacgtttgcgcgaattgaacctgccgcaaggccgtctgaaaaccggcacgccgccgcgcatcgacggacgcacgattgacttctcccaactgaccgaacagcccggcgacacgcccgttcccgtcatgtccgtacgcggcaacgccgaaatgcacccgcgccaagtgtcctgctggattacgcataccaacacgcaaacccacgacatcatccgctcaggcttcgaccgcagcccgatgtttaccggcaaaatcgaaggcgtgggcccgcgttattgtccgtctatcgaagacaaaatcaaccgcttcgccgacaaagacagccaccagattttcctcgaacccgaaggcctgaccacgcacgaatactaccccaacggtatctccaccagcctgccgttcgacatccaaatcgcgctcgtccgcagtatgaaaggtttggaaaacgcccatatcctgcgccccggttacgccatagaatacgactacttcgatccgcgcaacctcaaagccagcctcgaaaccaaaaccattgagggattgtttttcgccgggcaaatcaacggcacgaccggctacgaagaagccgctgcgcaaggactgctcgcaggcgcaaatgccgtgcaatacgtccgcgaacaagacccgctcctgctgcgccgcgaacaagcctatctcggcgtattagtggacgaccttatcaccaaaggcgtgaacgagccttaccgaatgttcaccagccgcgccgaataccgcctgcaactcagggaagacaacgccgatatgcgcctgaccgaagacggctacaaaatcggcttggtgggtgaagaacaatggcgtatgttcaacgaaaaacgcgaagccgtcgaacgcgaaatccaacgtttgaaaacaacgtggtacacgccgcaaaaactcgccgaagacgaacaaatccgtgtgttcggacaaaaactcagccgcgaagccaacctgcacgatttgttacgccgcccaaacctcgactacggcgcactgatgacgctcgaaggcgcgatgccgtctgaacgcctctccgccgaagtggtcgaacaagtcgaaatccaagtcaaataccaaggctatatcgaccgccaaaacgaagaaatcgacagccgccgcgacatcgaaaccctaaagctgcccgacgacatcgattacagcaaagtcaaaggtttgtcggcagaagtgcaacaaaaactgaatcagcacaaacccgaaaccgtcgggcaggcaagccgcatttccggcgtaacacctgccgccgtcgcattgctgatggtgcatttgaagcgcgggtttaaagacgcaaaataa

SEQ ID NO: 67981 - DNA, 258 bp, Neisseria meningitidis; identical to SEQ ID NO: 41721

SEQ ID NO: 67982 - DNA, 516 bp, Neisseria meningitidis
ttggtaacgcgggaggtttgcgaaccgcgaagttggacagtaaagacgcggattatacaggcaaacgtgttcagacggcatctgaacgccatgccgtctgaacacgcggcttatgccgacttgacggcgagttccgccaagcgtttgctttgtgcgaaggcgatattgttttcttcggcggtcaggacgggagccgctgtcgggaatatcttttttgacggcttcgcagacggcggagactttggggacggtgcgcaatacggcttcgcaaccttcaacgctgtcgatgccgcgagcgattcggcgggcgggattgcgggtgctgccgttttggaaatagtagaggacgaggattttgagggggatttgggttcatgggcggattccgttaaaatggttcggtcttcagacggcataacagttgttccgatgccgtctgaaacagccgcagttcaggcatttgttcctgacggcaaaattggctataacatcgggcatcaatgcccaacttactga

SEQ ID NO: 67983 - DNA, 285 bp, Neisseria meningitidis
atgaaaaaactgttattggccgccgttgtttccctgagtgccgcaaccgcatttgccggcgattctgccgagcgtcagatttacggcgatccccattttgaacaaaaccgcacaaaagccgtgaaaatgttggaacagcgcggttatcaggttcacgatgtcgatgccgacgaccattggggtaaacctgttttggaagtggaagcctataaagacggccgcgaatacgacattgtgttgtcttaccccgacctgaaaatcatcaaagagcagctcgatcgctga

SEQ ID NO: 67984 - DNA, 1551 bp, Neisseria meningitidis
atgaaaaaacctttgatttcggttgcggcagcattgctcggcgttgctttgggcacgccttattatttgggtgtcaaagccgaagaaagcttgacgcagcagcaaaaaatattgcaggaagcgggcttcttgaccgtcgaatcgcaccaatatgagcgcggctggtttacctctacggaaacgacggtcatccgcttgaaaccggagttgctgaataatgcccggaaatacctgccggacaacctgaaaacagtgttggaacagccggttacgctggtaaaccatatcacgcacggccctttcgccggcggattcggcacgcaggcgtacattgaaaccgagttcaaatacgcgcctgaaacggaaaaagttctggaacgcttttttggaaaacaagtcccggtttcccttgccaataccgtttattttaacggcagcggtaaaatggaagtcagtgttcccgccttcgattatgaagagctgtcgggcatcaggctgcactgggaaggattgacgggaaaaacggtttatcaaaaaggtttcaaaagctaccgcaacagctatgatgcgcccttgttcaaaatcaagctggcagacaaaggcgatgccgcgtttgaaaaagcgcatttcgattcggaaacttcagacggcatcaatccgcttgctttgggcagcagcaatctgaccttggaaaaattctccctagaatggaaagagggtgtcgattacaacgtcaagttaaacgaactggtcaatcttgttaccgatttgcagattggcgcgtttatcaatcccaacggcagcatcgcaccttccaaaatcgaagtcggcaaactggctttttcaaccaagactggggaatcaggcgcgtttatcaacagtgaagggcagttccgttttggcacactggtttacggcgatgaaaaatacggcccgctggatattcatatcgctgccgaacacctcgatgcttctgccttaaccgtattgaaacgcaagtttgcacaaatttctgccaaaaaaatgactgaggaacaaatccgcaatgatttgattgccgccgtcaaaggcgaggcttctggactgttcaccaacaatcccgtattggacattaaaacttttcgtttcacgctgccgtcaggaaaaatcgatgtgggcggaaaaatcatgtttaaagatttgaagaaggaagatttgaaccaattgggtttgatgctgaagaaaaccgaggcagacatcagaatgagtattcctcaaaaaatgttggaagacttggcggtcagtcaggcaggcaatattttcagcgtcaatgccgaagatgaggcggaaggcagggcaagtcttgacgacatcaacgagaccttgcgcctgatggtggacagtacggttcagagtatggcaagggaaaaatatctgactttgaacggcgaccagattgatactgccatttctctgaaaaacaatcagttgaaattgaacggtaaaacgttgcaaaacgaaccggagccggattttgatgaaggcggtatggtttcagagccgcagcagtaa

SEQ ID NO: 67985 - DNA, 534 bp, Neisseria meningitidis; identical to SEQ ID NO: 39841

SEQ ID NO: 67986 - DNA, 438 bp, Neisseria meningitidis; identical to SEQ ID NO: 59753

SEQ ID NO: 67987 - DNA, 264 bp, Neisseria meningitidis; identical to SEQ ID NO: 39198

SEQ ID NO: 67988 - DNA, 1446 bp, Neisseria meningitidis; identical to SEQ ID NO: 45959

SEQ ID NO: 67989 - DNA, 672 bp, Neisseria meningitidis
atgatgaagacttttaaaaatatattttccgccgccattttgtccgccgccctgccgtgcgcgtatgcggcagggctgccccaatccgccgtgctgcactattccggcagctacggcattcccgccacgatgacatttgaacgcagcggcaatgcttacaaaatcgtttcgacgattaaagtgccgctatacaatatccgtttcgagtccggcggtacggttgtcggcaataccctgcaccctacctactatagagacatacgcaggggcaaactgtatgcggaagccaaattcgccgacggcagcgtaacctacggcaaagcgggcgagagcaaaaccgagcaaagccccaaggctatggatttgttcacgcttgcctggcagttggcggcaaatgacgcgaaactccccccggggctgaaaatcaccaacggcaaaaaactttattccgtcggcggtttgaacaaaaccggtacgggaacgtacagcataggtggcgtggaaaccgaagtcgtcaaatatcgggttcggcgcggcgacgatacggtaacgtatttcttcgcaccgtccctgaacaatattccggcacaaatcgggtacaacgacgacggcaaaacctatacgctgaaactcaaatcggtgcagatcaacggccgggcagccaaaccgtaa

SEQ ID NO: 67990 - DNA, 417 bp, Neisseria meningitidis
atgcgcttactccatactatgctccgcgtgggcaatctcgaaaaatccctcgatttctaccaaaacgttttgggtatgaaactgctccgccgaaaagattatcccgaaggcagatttacccttgccttcgtcggttacggcgacgaaaccgacagcacggttttggaactgacgcacaactgggatacggaacgatacgacttgggcaacgcctacggacacatcgcggttgaagtggacgatgcctacgaagcctgtgaacgtgtgaagcggcagggcggaaacgtcgtccgcgaagccggcccgatgaaacacggcacaaccgtgatagccttcgtcgaagaccccgacggatacaaaatcgagttcattcaaaagaaaagcggtgacgattcggttgcctatcaaactgcctga

SEQ ID NO: 67991 - DNA, 2463 bp, Neisseria meningitidis
atgacacaaaaagaaaagcattttgaggaatatgccgccttggcaacccttcctttgcgggatgtcgtcgtttacccgcatatggttctgccgctgtttgtcggcagaccgaaatccatcgccgcactggaaaacgccattacccgcgaggagccggttttcctgttggcgcaaaccgatgcggcggtagaagaaccggttgccgccgacctgtatcagaccggtacggtcgcacaagtcctgcaagtgttgaaactacccgacggcacggtaaaagtattggtcgaagggctgtatcgcggacgtgttctgactattgaagacacgggcgggctgttcgtttcccatatagaggcggtcgtggaagaagacacgggcggcaataccgacctcgaagccgtgcgccgcaccctgttggcgcagtttgaacaatacgccaaactcaataaaaaaatccccgccgaaattatcggcagcattaacggcattgccgaaaacagccggctaaccgatacagtcgcagcgcatttgcagttgaaactgacgcaacgccaacagattttggagatttccgaaatcggcaaacggatggaattcctgctggcacagctggaatccgaactcgacattatgcaggccgaaaaacgcatacgcggacgcgtcaaacgccaaatggaaaaatcccagcgcgaatattatctgaacgaacagattaaagcgatacacaaagaattgggcgaagaagacgaaaacggcgaactggatgccttggaagcaggcatcaaaaaggcgggtatgagtaaagaagcggaagaaaaatgcctgtccgaactgaaaaaactcaaaatgatgccgccgatgtctgccgaatccaccgtcgtacgcaactacatcgacaccctgctcgaactgccgtggaagaaaaaatcccgcgtcagcaaagacatcgccaaagccggactggtgctggatgccgaccactacggcctggaaaaagtcaaagaacggattttggaatacctcgccgtccaaaaacgtatggacaaactcaaaggcccgattctgtgcctggtcggccctccaggcgtgggcaaaacctctttgggcgaatccatcgccaaagcaacggggcggaaatatgtccgcatggctttgggcggcgtgcgcgacgaaagcgaaatccggggacaccgccgcacctatatcggctccatgcctggtaagattctgcagaatatggcaaaagccggcgtaaaaaacccattgttcctgctcgacgaaatcgacaaattgggtagcgacttccggggcgatcccgccagcgcgttgctcgaagtgcttgatcccgagcaaaacaacaagttcgccgatcattatgccgaagtggattacgatttgagcgatgtgatgtttattgcgacttcaaacagcctgaatatcccgaccccgctgctcgaccgtatggaaatcatccgtctgtccggctacaccgaagacgaaaaaatcaatatcgcgatgcagtacctcgtgccgaagcaaatgaagcgcaacggcgtgaaagaaggggaattggcaatcgaagaaagcgcggtgcgcgatattatccgttactacacccgcgaggcgggcgtgcgttcgctcgaccgcgagattgccaaaatctgccgcaaggtggtgatgcagattaccttggacgaagataagaagaggttgtctgaaaccaagaaaaccagcaaagccaaacctaaagcggttaaagtaaatgagaaaaatctgcacgactatttgggtgtgcgccgcttcgattacggcgttgccgaaagcgaaaaccgtatcggacaagtaaccggtctggcgtggacagaagtcggcggcgaactgctgaccgtcgaagccgcagcattgccgggtaagggcgtgattcagtgcaccggccagttgggcgatgtgatgaaggaatccgtgtctgcagcgtggtcggttgtccgctcccgcgcggaatcagtgggcttggctcctgatttttacgagaaaaaagacatccatgtccatgttcccgaaggtgcgacgccgaaagacggtccgagtgcgggcattgccatgactttggcgatggtgtctgcattcaccaaaatcccggtgcgcgccgatgttgccatgacgggcgaaattaccctgcgcggcgaagtcctgccgattggcggtctgaaggaaaaactgttggctgcgcttcgcggcggcatcaaacacgttttaattccaaaagacaacctcaaagacttggaagaaatccctgaaaacgtgaaaaccggcctgaccatccatccggtcaaatggatagacgaggtattggctctgggtttggaaagccagcctgagccttgggcagaaccttctggtgcggaagcggcggcggaatccgcttcaaaaccaaaaccccgcagcagggcaaccaaacattga

SEQ ID NO: 67992 - DNA, 435 bp, Neisseria meningitidis; identical to SEQ ID NO: 36184

SEQ ID NO: 67993 - DNA, 906 bp, Neisseria meningitidis
gtggcacgggatttttacaaagaatacaaccccttatttatcaaaacataccaatccgaacaccccggcacatccgtcagcatccaacagtcccacggcggctccagcaaacaggcattatccgtagccaacggccttcaagccgatgtcgtaaccatgaaccaatcctccgacatcgacctgctcgaaaaaaaaggactggtagaaaaaggctggcaacaagccctccccgaccacgccgcgccctacaccagcactatggttttccttgtccgaaaaaacaaccccaaacagatccgcgattggaacgaccttgccaaagacggcgttaacatcgtcatcgccaatcccaaaacctcgggcaacggacgctacgccttcctcggcgcatacggttacggtctgaaaaccaccaacggcaacgaacaggaagcccaaaaactcgtcgcatccatcctcaaaaacacccccgtttttgaaaacggtggacgcgccgccaccaccaccttcacacaacgcaacatcggcgacgtactcatcacttttgaaaacgaagccaactacgtcagcaaaaaactgacccaaggacagtttgaaatcgtctatccgagctacaccatttccaccgaaagccccgtcgccgtcgtcaacagcgtcgtcgcgaaaaaaggcacgcaaaaaaccgcccgcgcctatctcgaatacctttggagcgaaccggcgcaagaactcgccgcctcactctacctgcgcccccgcaaccccgaagtattggcaagacacaaagccgacttcccagacttagacaccttctctcccgaaaaaaaattcggcggatgggacaacatcatgaaaacctacttcgccgacggcggcatattcgaccgcctgaccgcacaaaaatga

SEQ ID NO: 67994 - DNA, 279 bp, Neisseria meningitidis; identical to SEQ ID NO: 36930

SEQ ID NO: 67995 - DNA, 1776 bp, Neisseria meningitidis
gtggctaaaacatatttattgactgcattgataatgtctatgacaatctttggatgtcaagtcatccatgccaatcaaggtaaggttaatactcattctgctgtcatcacaggtgcagacgctcacacgcctgaacatgcaacgggactgaccgaacaaaagcaggtgattgcaagtgattttatggtagcgtcagccaatccattagcaacacaagctggctatgatatcttaaagcaaggcggtagcgctgcagatgcgatggtggcggtgcagacgacactaagcttggtagagccacagtcgtcaggcttgggcggtggtgcatttgtgttgtattgggataataccgccaaaacattgaccacatttgatgggcgtgagacggcaccgatgcgtgcgacgccggaattatttttggataaagatggtcaaccattgaaatttatggaagcggtggtcggtggtcgctcggtgggtacgcctgctatccctaaactgatggagacaatacatcagcgatacggtgtattgccttggggaaaattatttgatacaccgatccgcttggcaaaacaaggctttgaggtgtcgccaaggcttgccatctcggttgagcaaaatcagcagcatttggcacgctatccaaaaacagccgcttattttttgccgaatggtgtgccgctacaagcaggcagcttgctgaaaaatttagaatttgctgacagtgttcaggcgttagcagctcaaggtgcaaaagctctgcatactggtaaatatgcccaaaatatcgtttcagttgtccaaaatgctaaggataaccccggtcaattatccttacaagatttatctgattatcaagtggtggaacgcccgcctgtttgtgtgacttatcgtatttatgaagtatgcggtatgggtgcaccaagctcaggtgggattgctgtgggtcagattttggggattttaaatgaattttcacccaatcaggtggggtatgatgctgaaggtttacgtctcttgggcgacgcttctaggcttgcgtttgcggatcgtgatgtatatttgggcgaccctgattttgtaccagtacccattcgccagttgatttctaaagactacctaaaacatcgcagccagctgcttgagcagtcggataaggcattgcctagcgtatctgcaggcgattttattcatgagtgggtgtcctcacaagcgattgagttaccttctaccagtcatatatcaattgtggataaggcgggcaatgtgctatcaatgacgacttccattgaaaatgcgtttggctcaactttgatggcaaatggctacctgctgaataatgagctgacagactttagttttgagccaataaagcagggcaaacaggtcgccaatcgtgtcgagcccggcaagagaccacgctcctcaatggcaccaaccatcgtatttaaagcaggcaagccttatatggcaatcggctccccaggtggtagccgtatcattggctatgtcgctaagacgattgtggcacatagtgactggaatatggatatccaagatgccatcagtgcacccaatttattaaatcgctttggtagctatgaactagaaacgggtacaaccgccctccagtggcaacaagcattaaatgatttgggctataagactgacgtgcgtgagctaaattcaggtgttcaagccattattatcgagccaagcaggctggttggtggtgccgatccacgccgagaaggtcgagtgatgggtgattag

SEQ ID NO: 67996 - DNA, 1110 bp, Neisseria meningitidis
atgttttcggacacagatatatccatgatggaaaacgccctccgacttgccgctttggggcgtttttccacttcgcccaatccgcgcgtcggctgcgttatcgcacacggcagccaaattgtcgggcaaggcttccacgtcaaagcgggcgaaccccatgccgaagtccacgccctgcgtcaggcgggcgaaatggcacaaggcgcgaccgcctttgttaccctcgaaccgtgcagccattacgggcgcacaccgccctgtgccgaagcactggtgcgggcgggcgtgtcccgcgtcgttgccgccatgcgcgaccccaacccgctggttgcaggcaaagggcttgccctgctcgaagcagcaggcatcaagacggaatgcggtttactcgaacatcaggcaagggaactcaaccgaggcttcctgtcgcgcatcgaacgccgccgcccctttgtccgcctcaaatgcgccgtttcgctggacggcaaaaccgccctttcagacggcagcagcttttggattaccggcgaagacgcgcgtgccgacgtacaggttttgcgtgccgaaagctgcgcggtgctgaccggcatcggcacggtgttggcggacaatccccggctcaacgtccgcgcttttccaactttgcgccaacccgcacgcatcgttttagacagccgcctgcgcctgcccccgaacagccatttggttaccgacggacaatctccgacctacatcgccacactcgaacgcaacgaagacagactgcacccctatcgggaacacgcacacgtccgcatcctgatgccgtctgaaacggcagacagcaaaatcgacctgcaccacctgatgcgcctccttgctgacgaaggtttcggcgaaatcatggtcgaagcaggctccgaactcacatccgcatttttggcagaaaatctggcggacgaaatcgtgctgtaccgttcgcccaaaatcctcggcagcggcaaagacctgctttccctgcccgaaaaccgcgccgccctttccgcaccgcccttgtggacacccgtttcaagcgaaatcctcggacacgacatcaaaaccgtgttccggaaaaacgataacgccttttaa

SEQ ID NO: 67997 - DNA, 1248 bp, Neisseria meningitidis
atgttttctctagaggcttggataggcttgaggtatctcagggcgaaaaagcgcaacggctttatgtcgtttatcacgatggtttcgattgccggaatcgccttgggcgtaaccgcgctgattgtcgtcttgtcggttatgaacggctttcagaaagaaatacgcgggcagctcctgaatgtcgcgccgcacgccgaaatcggctatatcgacaatacggatacggattggcgcaacctgcttcggtttacggaaaaccgcaaaggtattttggctgccgcgccctatgtttccaatcaggctctgctggcaaacgcgggcgaaatcaggggcgtgcagatgcgcggcattttgccgtctgaagaacgcaaagtggtggaatatggcgacaaaatgccggcaggcaaatttgaagacctgattccgggcgagtttgacattatcctcggtgtcggcttggcggaggctttgggggcggaagtcggcaataaagttaccgtcatcacgccggagggcaacgttacccctgccggagtcgtgccgcgcctgaagcagtttaccgtggtcggtttggttaagacgggcgtttacgaagtggacaactcattggcgatgacgcatatccaagacgcgcgcgtactgtaccgcttggataaggaagttgcggggctgcggctgaaactcgccgacccgcaaaacgcccccgccttgacggcaaagctgattccggaggcgcaaagggatacggtttgggtacgcgattggacgttcagcaaccgcagctattttgaggcggtcgagttggaaaaacggatgatgttcatcatcctgacgctgattatcgccgtggcggcgttcaaccttgtctcttccttggtgatggcggttacggaaaagcaggcggacattgcgattttacggactttgggtctttcccctggcggcgtgatgaagatttttatggtgcagggcgcgttttcaggctttttcggcacgctggcgggtgtggtctgcggcgtgcttttgggttggaacgtcggcagagtcgtggcattttttgaaaacctgctcggtgtccaccttatcaattcgcaggtttattttatcgactacctgcccagcgatgtcgatatgggcgacgttgccctgattgcctgcatttctttgggactgtctttcgttgccacgctctacccgagccggcgcgcgtcaaaaacccaaccggcggaggctttgcgttatgagtga

SEQ ID NO: 67998 - DNA, 492 bp, Neisseria meningitidis; identical to SEQ ID NO: 62217

SEQ ID NO: 67999 - DNA, 1917 bp, Neisseria meningitidis
atggcaaaagtaatcggtatcgacttaggtacaaccaactcttgtttggccatttccgaaaacggtcaaaccaaagtgatcgaaaacgcagaaggcgcacgcaccacgccgtccgttatcgcttatttggacggcggcgaaatcctcgtcggtgcgcctgccaaacgccaagccgtaaccaacgctaaaaacaccatttacgccgccaaacgcctgatcggccacaaatttgaagacaaagaagtccaacgcgacatcgaatctatgcctttcgaaatcatcaaagccaacaacggcgacgcatgggtaaaagcacaaggcaaagagctgtctcctcctcaaatttccgcagaagtcctgcgtaaaatgaaagaagccgccgaagcttacttgggcgaaaaagtaaccgaagccgtgattaccgtccctgcctacttcaacgacagccaacgtcaagctaccaaagacgcaggccgtatcgccggtttggacgtgaaacgcatcatcaacgagccgactgcagctgctttggcattcggtatggacaaaggcgacaacaaagaccgcaaagtagccgtatatgacttgggcggcggtacttttgatatttccatcatcgaaatcgccaacctcgacggcgacaaacaattcgaagtattggcaaccaacggcgataccttcttgggcggtgaagacttcgaccaacgcctcatcgaccacatcatcgccgagttcaaaaaagaacaaggcattgatttgaaacaagacgtgatggctctacaacgcctgaaagaagctgccgaaaaagccaaaatcgaattgtccagcggccagcaaaccgaaattaacctgccgtacatcaccatggacgcaaccggcccgaaacacttggcgatgaaaattacccgcgccaaattcgaaagcctggttgaagacctgattgcccgctctatcgagccttgccgcaccgcattgaaagatgccggtctgagcactggcgacatcgacgacgtgattttggtcggtggtcaaagccgtatgccgaaagtacaagaagccgttaaagacttcttcggcaaagagccgcgcaaagacgtgaaccctgacgaagctgtcgccgtaggcgcagcgattcaaggcgaagtgttaagcggcggccgcagcgacgtattgctgctggacgtaacccctctgtccttgggtatcgaaaccatgggcggcgtgatgaccaagctgattcaaaagaacacaactatcccgactaaagcgtcgcaagtgttctctaccgccgaagacaaccaaagcgcagtaaccatccacgtactgcaaggcgaacgcgaacgcgcttctgccaacaaatctttgggtcagttcaacttgggcgacatcgcacctgcaccgcgcggtatgccgcaaatcgaagtaaccttcgacatcgacgccaacggcatcctgcacgtttccgccaaagacaaaggcaccggtaaagcagccaacattaccatccaaggttcttcaggtttgagcgaagaagaaatcgaacgcatggtgaaagatgccgaagccaatgctgaggaagataaaaagctgactgaattggtcgcttcccgcaaccaagccgaagccctgattcactccgtgaaaaaatctttggcggactacggcgacaaactcgacgctgccgaaaaagaaaaaatcgaagccgcgctgaaagaagccgaagaagccgtgaaaggcgacgacaaagccgccatcgatgccaaagccgaggcgctgggcacagccagccaaaaactgggcgaaatggtttacgctgaagcccaagcaggcgaaagcgaacaagccaatgcttctgcaaagaaagacgatgatgtcgtagatgccgactttgaagaagtaaaagacgacaaaaaataa

SEQ ID NO: 68000 - DNA, 252 bp, Neisseria meningitidis
atgaagacattagaaaaacggatgaaagctctagacaaacggatgatgaagttaggaaaatcccttgaaggcaggcttgatgcccgtctgattgaatccgcattggattatattcattattcggaacgttttttggcttttgaaatcctgtgtacttatattgaagatttcgatatccggctgacggaacaagaatcccaagaaatttcttttattgacaaggaatttaggacagaaagtatgttagattat

SEQ ID NO: 68001 - DNA, 234 bp, Neisseria meningitidis; identical to SEQ ID NO: 40733

SEQ ID NO: 68002 - DNA, 666 bp, Neisseria meningitidis; identical to SEQ ID NO: 45923

SEQ ID NO: 68003 - DNA, 540 bp, Neisseria meningitidis
atggctcggttgagagagttttataaagagacagttgttcctgaattggttaaacaatttggttacaaatcagtaatggaagtcccgcgtattgaaaaaattaccttgaatatgggtgtgggtgaggctgttgctgataaaaaagttatggaatatgctgtttccgatttagagaaaattgccggtcaaaaaccggttgttactgttgcccgtaaatctatcgcaggttttaaaatccgtgataactatccggttggttgcaaagtaacattgcgtcgtgatcaaatgtttgaattcttggatcgtttgattactattgcattacctcgcgtacgtgacttccgtggtgtgagcggtaaatcatttgatggccgtggcaattataatatgggtgttcgtgagcaaattatttttccggaaattgaatacgataaaattgatgctttgcgtggtttgaatattactattactactacagcaaaaaccgatgaggaagcgaaagctttattgtcattgtttaaatttccgttcaaaggataa

SEQ ID NO: 68004 - DNA, 912 bp, Neisseria meningitidis
atggttcatattatgtttaatcaggcagcacaagaattgacgactatccgcgatattttacgttttgcagtcagccgttttaatgaggcagggctcttttttggtcatggaacggataatgcgcatgatgaagcagcttatttgattctgcatactttgaatttgcctttggatatgcttgccccatatcttgatgcaaaactcttggaagctgaaaaagaggaagtgctgacggttattgagcgtcgtgctgtcgaacacattccagccgcttatttgacacaccaggcatggcagggagagtttgatttctatgtggatgagcgcgtaatcatacctcgttcttttatttatgaattgttgggtgacggacttcgtccttggatagaatacgatgagctggtgcataatgctttggatctttgcactggaagcggatgccttgccattcagatggcgcatcattatcctgatgcccaaattgatgcggttgatgtgagcttggatgctttggaagtggcagggatcaatgtcgaagattatggtttggaagaacgcatccggcttattcatacggatttgtttgaaggattggaaggcacttatgatttgattgtttccaatccgccttatgtggatgcggaatcggttgagttattgcctgaagagtatttgcacgaaccggaattggcattgggcagcggggcggacgggttggatgccaccaggcagattcttctgaatgcggcaaagtttctgaatcccaaaggtgtattgctggtggaaatcgggcataacagggatgtattggaagcagcgtatccggagttgccttttacttggttggaaaccagcgggggcgacggttttgttttcctcttgacgcgcgagcagttattgggtgaagagtga

SEQ ID NO: 68005 - DNA, 291 bp, Neisseria meningitidis
atggatgatctaatactatattttttatcaggtatattcggaaatcaagttgctgaatatattataaaaaacaaccgtgatataaaagttccctttattgtgctttacgcaatattttttacgttgatttatactgtgactttgttgtttctcagtctgatctattgggtcaatggtgcggagattgcatggaaggggataggtattttcagtatgtcggtcagtttttgtatagtcttctgtctttatttgattgacaaggcaggaagatgtaaggataagaaacaatag

SEQ ID NO: 68006 - DNA, 402 bp, Neisseria meningitidis
atgcgtacaataaaatatcttgcaatggcgttattgcttatgtttacggttgccggctgtcagttggcgggttggtatccatgtccgtcgttgtccggctggtgtaagccgagaaaaccggccgccatcgatttttgggatattggcggcgagagtccgccgtctttagaggactacgagataccgctttcagacggtaatcgttccatcagggtaaatgaatatgaatccgcacaacaatcttacttttacaggaaaatagggaagtttgaagcctgcgggttggattggcgtacgcgtgacggcaaacctttgattgagacgttcaaacaggaaggttttaattgtttgaaaaagcagggattgaggcgcaacggcctgtccgagcgcgtccgatggtaa

SEQ ID NO: 68007 - DNA, 306 bp, Neisseria meningitidis; identical to SEQ ID NO: 36883

SEQ ID NO: 68008 - DNA, 1281 bp, Neisseria meningitidis
atgactgcatcgaaatcaggttttatcgggcaaatcttttcccgaaatatgcttgtctgtatttttacggggtttacctcggggctgccgctgtactttctgattaacctgattccggcgtggttgcgcagcgagcaggtggatttgaagagcatcgggctgatggcgctgatcggtctgccgtttacttggaaatttttgtggtctccgctgatggacgcggtcagggttcccattttgggccggcggcgcgggtggatgctgttgacgcaggcagggttgctggcggctttggcggcatatgcctttttaaacccccggaatcatctgccgttgattgccggcttgtcggtgcttgtcgcttttttttccgccagtcaggatattgtattggatgcgttcaggcgcgagattttgtcagacgaagaattgggtttgggcaactcggttcatgtgaacgcctaccggattgccgccctgattcccggttcattgagtttggtgttggcagacaggatgccgtggtcagaagtatttgttatcacttcattatttatgctgcccggccttctgatgacgctgtttcttgcgcgcgaacccgtgttgcctcctgccgttcctaaaacgttgaagcagaccgtggtagagccgtttaaagaattttttacgcgcaagggcatcgcttcggcggtgtgcgtgctgctgtttatcttcctttacaaactcggcgacagtatggcaaccgcgttggcaacgccgttttatctggatatgggtttcagcaagacagacatcggtttgattgcgaaaaatgcaggactgtggccggcagtggcggcaggtatcttgggcggcgtgtggatgctgaaaatcggcgtaaacaaagccttgtggctattcggcgcggtgcaggctgtaaccgttttggggtttgtatggctggcagggttcggacatttcgacacggtcggcacaggcgagaggctgatgctggcggcagttatcggcgcggaagcggtcggcgtggggttggggacggcggcgttcgtatcgtatatggcgcgtgaaaccaatcccgcatttaccgcaacgcagcttgcgctgtttaccagcctgtccgccgtcccgcgcacggtcatcaattcctttgccggttatctgattgaatggctcggttatgtaccgtttttccaactgtgtttcgcactcgccctaccgggtatgctgctgctgaaagttgcgccttggaacggggagaaaactcaggatgcaggcagatga

SEQ ID NO: 68009 - DNA, 651 bp, Neisseria meningitidis
atgcccgtgacccgccccgccaaaatcaatacttacacacgcatcatcgacgccagccttgcgcttttcaacgaggaaggcgagcgcaacatcagcaccaaccatattgccgcccacttgggcatcagtccgggcaacctctattaccacttccgcaacaaagacgaaatcatcgtccaactgttcaaacgttacagcgaagccctgctggaatacctcaacgaagccgtgttgccgtctgatgtggaagactccatcaattatatggcgggcatttacgacgtgatgtgggaataccgcttcctattcagcgacgtgaacaccctgcttgcacgcagtgccgaactattgggcgaacacaataccttcacccaagccaaagtctccccgctcttggtcaacctgctgacccagctcaacggtctgaacatcatccaagccgaccaaaccgccatgaacgacctcgccgtcaatatgtggatgatcacgaaatactggttcgacttcgacagctccctgcgcggtcgtaccaagctgaccgaagactccaaagcacgcggcatccgccgcaccttaagcctccttcgtccttatcttttgcccgaacaccgcaagaaatacgaccggaaaatcggcaacggcaacccgtaa

SEQ ID NO: 68010 - DNA, 654 bp, Neisseria meningitidis
atgggattgggcatggaaatcggcaagctgattgtggcttttttggtgctgattaatccgtttagcgcgttgtcgctttaccttgacctgaccaacgggcacagcacgaaggagcgcaggaaggtcgcgcggacggccgccgttgccgtgtttgccgtgattgcggtatttgcgctgatcggcggtacgctgctgaaggttttgggcatcagcgtcggttcgtttcaggtcggcggcgggattttggtgctgctgatcgccatttcgatgatgaacggcaacgacaatcccgccaagcagaatctcggcgcgcagccggaaacggggcaggcgcgccccgcccgcaatgccggagcgattgccgtcgtgcccatcgccataccgatcaccatcggcccgggcggtatttcgaccgtgattatttacgcttcggcagccaaaacgtacagcgacatcgcgctgattatcgtggccggtttggtggtcagtgcgatttgttatgccattttaatcgttgccgggaaggtcagccgcctgctgggcgcgacggggctgacgattttaaaccgtatcatgggtatgatgctggcggcggtatcggtggagattattgtgtcgggactgaaaacgatattcccgcaactggcaggttga

SEQ ID NO: 68011 - DNA, 756 bp, Neisseria meningitidis
atggggcgtttacttttgggcagtatccgcatgagcatcattgtcgaaaacctgaccgtcagctaccgccgccgccccgccgtgcaccatgtggacattacttttgaagaacatagtatgtgggcggttttcggtcccaacggcgcagggaaatctacctttcttaaatccttgatgggattgcagcccatcgacactggcagcatccggctggacggattgacccgtcagaacattgcctaccttccccagcagtccgacatcgaccgctcgcagcccatgaccgttttcgacttggcggcaatggggctgtggtatgaaatcggctttttcaaagggataaataccgctcaaaaacaacgcgttcacgaagccttggagcgtgtaggaatgcggcagtttgcccgccgccaaatcgcccacctctcaaacggacaattccaacgcgtcctttttgcccgaatgctggttcaaaacgccaaattcctacttctagacgaacctttcaacgctgttgatgcacggacaacctacgaacttctcgacgtattgcagaaatgccattgcggcggacacgctatcattgccgttttgcacgattacgaacaagtccgtgcctactttcccaataccctgctgctcgcccgagaaaaaattgcggcaggcgcaaccgagaccattctgacagaaccctacctcgcccaagccaacgccaaaatgcagcaacaggaaagccccgagtggtgcgcgtcataa

SEQ ID NO: 68012 - DNA, 1128 bp, Neisseria meningitidis
atgtacactttccgcccgtttcccaaactgcacacagaaacacacattatgaacatacaaaacatccgcaccctcctcgacaccgtcgccgttccgaatacggcacgcacgctcggcggcgaaaaggccgtccgttcggttgaacagcgttcagacggcatccatatcgccctgcatttcggcttccccgtcgcgcacattgcctcagaaacagccgaccgcatacaggaaatcctgatgccgctgacaggcgacacacacatccatctgtccatggacactgaaatcggcacacacaaagtccagcccggcgttaccaccatcaaaggcgtgaaaaacatcatcgccgtcgcctctggcaaaggcggcgtgggcaaatcaacaaccaccgccaaccttgccgccgcaatggcgcgcatgggcgcgcgcgtcggcgtgctcgatgccgacctttacggcccgagccaaccgaccatgttgggtgtggacgaccgcaaacccgatcagaaaaaccaaaaactcattcccgtcgaatcttcagacggcatacaggtcatgtctatcggctttctcgtcgataccgaccaagccgtcgtctggcgcgggccgatggtcagccaagccttgcagcaactgatgtttcaaagcgagtgggacgaagtggactacctgtttatcgacctgcccccgggtacgggcgacatccagctcacgctgtcccagcgcatccccgtaaccggttccgtcatcgtaaccacgccgcaggacatcgccctgatagacgcgcgcaaagccgtggatatgttccgcaaagtcaacattcccattttgggcgtattggaaaatatgtccgtccacatctgcaccaactgcggacacagcgaagcactgttcggcacggacggcggcaaagatttagccgcacgcctcaacgtccccctgctgggacagcttcccctaagcctgcccgtgcgcgaagccatggacggcggcacaccggcgcaactgttcgacgaacaccccggcatcgccaaaatctacaccgatgccgcattccaaatcgccctgggcattgccgacaaaggcaaagacttcagcagccggttccctaaaattgtcgtcgaataa

SEQ ID NO: 68013 - DNA, 1047 bp, Neisseria meningitidis
atggaggcacgcccgccccgggcaaatgaagcccaagccccccgcgcggatgaaatgaaaaaagaaagccgccccgcgtttgacgcggcagccgtatttgacgcggcagccgtaccggtatccgacagcgggtttgccgccaatgcaaatgtccgccgttttgtggacgatgaagtcgggaaaggggatttttcccgggcggaatggcaggatttttttgacaaagcggcttacaaggcggacatcgtcaagattatgcaccgcccctccacatcgcgtccgtggtatgtgttccgcacgggaaattcgggcaaggcgaaatttcgcggcgcgcgccggttttatgcggaaaaccgcgcgcttatcgatgatgtggcgcaaaaatacggcgtgcctgccgaacttatcgtggcggttatcgggattgaaacgaattacggcaaaaatacgggcagtttccgtgtggcggacgcattggcgaccttaggctttgattacccccgccgcgccgggtttttccaaaaagaattggtcgagcttttaaagctggcaaaagaagaaggcggcgatgttttcgcctttaaaggcagctatgcgggcgcaatggggatgccgcaatttatgccttcgagctaccggaaatgggcggtggattatgacggggacggacatcgggacatatggggcaacgtcggcgatgtcgcggcatcggttgccaattatatgaagcagcacggttggcgcacgggcgggaaaatactggtgtctgcaacattggcgccgggtgcggatgttcaggcaatcattggcgaaaaaaccgccctgacgcggacggtggcggatttgaaggcgtacggcatcatccccggcgaagagcttgcagatgatgaaaaggcggttttgttcaaactggaaaccgcaccgggcgtgtttgaatattatttgggcttgaacaatttttatacggtatggcagtacaaccacagccggatgtatgtaacggcggtcagggacattgccaattcgcttggcggctcgggattgtaa

SEQ ID NO: 68014 - DNA, 2115 bp, Neisseria meningitidis
atgttcctcttttcagacggcctacaatctattaataacaataatcgacgaaaacgcattgtgaaaaacgcctacatcccctctcgcggcatccgcaaaatcccccatctctccaccctattgcccgagtttcatatctacaaagacggaaaaggagcagaggctgttgtcggctggggtttgcgcccgacgacacacaaagcgcgtgcttttgccaccgaacaccagcttccctttattgctttggaagacggctttttacgatcgctcggactgggtgtcgccggctatcctccctattccatcgtctatgacgacatcggcatctactacgacaccacccgtccttcgcgtttggaacaactgattcttgccgccgataccatgccgtctgaaaccttggctcaggcgcggcaggcgatggatttcatcctgcaacaccacctgtccaaatacaaccacgcgcccgaactttcagacgatcatcctttacgctccccatccaagcctgaaactgtcctcattatcgaccaaaccttcggcgatatggccatccaatatggcggcgcagacgcctctacgtttgaactgatgtttcagacggccttgaatgaaaacccgcaagccgatatctgggtaaaaacccatcccgatgttttgtgcggcaaaaaacaaggctatctgacccaactggcgcagcaacaccgcgtccatcttctggcagaagacatcaacccgatttctttgttgcaaaacgtcgataaagtttattgcgttacctcgcaaatgggttttgaggcacttttgtgcggcaagccgctgaccaccttcggcctgccgtggtatgccggatggggtgtaagcgacgaccgccatcctgaaatcaaccgccttgttcaaacccaacgccgcgccacccgcaacttgctgcagctcttcgccgcagcctatctgcaatacagccgctacctcaaccccaataccggcgaagcaggcagcctctttgatgtcatcgactatctggcgacggtcaaacgtaaaaacgacaaattgcgtggcgagttatattgcgtcggtatgtctttgtggaaacgcgcggttgccaaaccgttctttaacgtaccctcttgccgtctgaaatttatctcttccacccaaaaactggcaagggtcaaactgtccgacgatgcacgcatcctggcttggggcaacggcaaagaggccatcgtccgctttgccgaacaacaccacatccccctgctgcgcatggaagacggctttatccgctcggtcggactcggctccaacttagtgccgccgctgtcgctcgttaccgacgatatgagcatttatttcaatgccgaaaccccgtcccgtcttgaatacatcctacaaaaccaaaacttcgacgatcaagactttcagacggccttgaagctgcaaaaaatgctgaccgaaaaccacatcagtaaatacaacgtcggcagctcagacttcaccgccccgtcaaccgacaaaaccgtgatcctcgttcccggccaggttgaagatgatgcgtctatccgctacggttcgccccaaatctaccgcaatctggatttgctccgtaccgtacgcgaacgaaaccccaatgcctatatcatctacaaaccgcatcccgatgtagtcagcggtaaccgcatcggccatatttcccctgaagatgctgcacgatatgccgaccaaaccgccgaacaagccgacatcctgacctgtctccaatacgcagacgaaatacataccatgacttcgctgaccggttttgaagccttgttgcgcggcaaaaaagtcagctgctacggcctgcctttttacgcaggctgggggcttacccaagatctgctccccatcccgcgccgtagccgcagacttgagctttggcagctgattgccggcacgctcatccactatcccgactacatccaccccgaaacccatcaggccataaatgcagaaaccgcagcccaaatcctgatacgacaaaaaaatatgcaaaaaaacaacaacggattacatcgcgggtactttgccaaaaaattaggtaaaatcaaacaactatatcgatctttcaaataa

SEQ ID NO: 68015 - DNA, 294 bp, Neisseria meningitidis; identical to SEQ ID NO: 52089

SEQ ID NO: 68016 - DNA, 366 bp, Neisseria meningitidis; identical to SEQ ID NO: 37248

SEQ ID NO: 68017 - DNA, 435 bp, Neisseria meningitidis
atgtgcgggttgtggctgctgcgcgccctgactgccaaactgccccaacagcgttatgcggctttgtttattacactgttttttgccgcagtattggtgttcgggcggcatgattcgatgtattggtatcccgtcctcgtcaatctgatgatgttggcggtgttcggcggcagcctgtttgccggacagacggtcatagaaaggctcgcgaggctgcaacagcccgacctgcctgaaaaagccgtgcgctatacccgccgggtaacgcaggtttggtgcgtattctttattgccaacgggacgcttgccgctttgttggcacggttggggcgatatgattggtgggcggtttataccggcgtgattgcctatgtattgatggggatgccgtttgccggcgaatggctttaccgcaaactcgttttgaaagtctga

SEQ ID NO: 68018 - DNA, 828 bp, Neisseria meningitidis
ttgcggtgttttatggaacgcattgatttagcattgaatttagttaaagagagaagccgacttggatactctcgaaagaattttgctgagcaaactggatgcagtgcagaaagtttgagactgtatgaaagcgggcaggtcaacattcctgcggactttttacttgctgctgtccaattaggggtggatattcaatttgtctttacaggcattcattcggcaaatttaaatgctgtttcagacgaccttaataaaaaattggacgacgctattggcaaatcaaacgttgagaatcagattaacggcaacgtcagtaacgctgttatcgcctcatctggttcggttgttcatcaaattaatacccaaaatcacgtcatcagaacccgtgtcgattcaaaacccggcaaggaacatataacgcttgagcaagcttcaaagctgcaacaacttgttaaacaagttgccgcagcagaagagattgccaaacggtcgccaaaatcaatccgtgcaatttgggctagtctgaatgctcactgtaaagttccaagttacaaactaatcgcattgagcgattacgacaaagcagaaacttatctcagaaaatggctgggtaggttgagcaatacagcaacatcaaagaacaacgatcccgactggcgaaaaaagaaatacgcttatatcaaattaaatgtaaaacagcttgagcttgaagattggttgaaaagttacctcgaaaaaaatttctcagtagaaagcctgactgaattaagtgatgaagatttgcaaaaaacatatgcagcagtatcgactaaaaaacggaaaaaatag

SEQ ID NO: 68019 - DNA, 1968 bp, Neisseria meningitidis
gtggggaacacctttaaatcaatccttgtctgggtcgccttgggtatcggcctgatggctgcgttcaacgctttagacggtaaaaaagaagacaacgggcaaatcgaatattctcagttcatccaacaggtcaacaacggcgaagtatccggcgtcaacatcgaaggatccgtcgtcagcggctacctgattaagggcgagcgcaccgacaaaagcaccttcttcaccaacgcgcctttggacgacaacctgattaaaacactgctcgacaaaaacgtccgtgtaaaagtaacgccggaagaaaaaccgagcgcgctggctgccctgttttacagcctgctgcccgtcctgctgctgattggcgcgtggttctactttatgcgtatgcagacgggcggcggcggaaaaggcggcgcattctcattcggcaaaagccgcgcccgcctactggacaaagatgccaacaaagttacctttgccgatgtcgccggctgcgacgaagccaaagaagaagtgcaggaaatcgtcgattacctcaaagcgccgaaccgctatcaaagcctgggcgggcgcgtgccgcgcggcatcctgctggcgggcagcccgggtacgggtaagacgcttttggcgaaagcgattgcaggcgaagccggcgtgccgttcttcagcatttcaggttccgactttgtcgaaatgttcgtcggtgtcggtgcaagccgcgtccgcgatatgttcgagcaggcgaagaaaaacgccccctgcatcatctttatcgacgagattgacgcagtcggccgccaacgcggcgcaggtttgggcggcggtaatgatgagcgcgagcaaacattaaaccaattgttggttgaaatggacggttttgagagcaatcagactgtaattgtgattgcggcaaccaaccgccccgacgtactcgatcctgcgctgcaacgccccggccgtttcgaccgccaagtggttgtccccctgccggacatccgggggcgcgaacagattttgaacgtccactctaaaaaagtgcctttggacaaatctgtggatttattgtccctcgcgcgcggcacgccgggtttttccggcgcggatttggcgaacttggtcaacgaagccgccctgtttgccggccgccgcaataaagtcaaagtcgatcagagcgattttgaagacgccaaagacaaaatctatatgggtccggaacgccgcagtatggtgatgcacgaagacgaaaaacgtgcgacggcgtatcacgaatccggacacgcgattgttgccgaaagcctgccctttaccgaccccgtccacaaagtaaccattatgccgcgcggacgtgcgctgggtctgacttggcagcttccggagcgcgaccgcatcagtatgtataaagatcagatgttgagccagctctccatcctgttcggcggacggattgccgaagacatcttcgtcggacgcatctccaccggcgcatcaaacgactttgaacgcgcaacccaaatggcgcgcgaaatggtaacgcgctacggcatgagcgacaaaatgggcgtgatggtttatgcggaaaacgaaggcgaagtcttcttgggacgcagcgtaacccgttcgcaaaacatttccgagaaaacccagcaggacatcgatgcggaaatccgccggattttggacgagcagtatcaggttgcctacaaaatcctcgatgaaaaccgcgacaagatggaaacgatgtgcaaagccctgatggaatgggaaaccatcgaccgcgatcaggtactggaaatcatggcgggcaaacaacccagcccgcccaaagattacagccacaacctgcgcgagaatgcggacgcggcggaagataacgcgccgcacgctccgactcgggaagaaaccgaagcacctgccccggcagacaccgcttcgacagagtccgagcagcagcctgaaaacaaggcttaa

SEQ ID NO: 68020 - DNA, 549 bp, Neisseria meningitidis
gtgtctcaaaacactccaatcaaaccttggtacaaacacgtctggccgtggatcttgatggcggggccgatttttgtcgtcatcgccagcgtcgctatgttttttgtcgcgcagcagcacgcgacagatttggttacggacgattattataaagacggcaagcatatcgacatccagcttcatcgggatgaagaagccgtcagacggcatatcggggtgcaggttctcatttcccccgatatgaatgcggcaaaagtgtttgtcggcggcgagtttgacggcaaacagcctttgaacctgctgctgatgcacccgacccgcaaggcggacgaccaaactgtcgccctcaagcccgtcggcagcgcgcagaacggcagggcggaatatgaggcggtgttcaaaacccttcctccgaccaaccactggtatgtgcgagtggaggacgcggcaggcgtgtggcgtgtcgagaacaaatggattaccagccaaggcaatgcggtcgatttgaccccgatggacaaacttttcaataatactgaaagcaaataa

SEQ ID NO: 68021 - DNA, 186 bp, Neisseria meningitidis; identical to SEQ ID NO: 37143

SEQ ID NO: 68022 - DNA, 237 bp, Neisseria meningitidis; identical to SEQ ID NO: 45833

SEQ ID NO: 68023 - DNA, 1521 bp, Neisseria meningitidis
atgcagctgatcgactattcacattcatttttctcggttgtgccaccctttttggcactggcacttgccgtcattacccgccgcgtactgctgtctttaggcatcggtattctggtcggcgttgcctttttggtcggcggcaaccccgtcgacggtctgacacacctgaaagacatggtcgtcggcttggcttggtcagacggcgattggtcgctgggcaaaccaaaaatcttggttttcctgatacttttgggtatttttacttccctgctgacctactccggcagcaatcaggcgtttgccgactgggcaaaacggcacattaaaaaccggcgcggcgcgaaaatgctgaccgcctgcctcgtgttcgtaacctttatcgacgactatttccacagtctcgccgtcggtgcgattgcccgccccgttaccgacaagtttaaagtttcccgcaccaaactcgcctacatcctcgactccactgccgcgcctatgtgcgtgctgatgcccgtttcaagctggggcgcgtcgattatcgccacgcttgccggactgctcgttacctacaaaatcaccgaatacacgccgatggggacgtttgtcgccatgagcctgatgaactattacgcactgtttgccctgattatggtgttcgtcgtcgcatggttttccttcgacatcggctcgatggcacgtttcgaacaagccgcgttgaacgaagcccacgatgaaactgccgtttcagacggcagctggggcagggtttacgcattgattattcccgttttggccttaatcgcctcaacggtttccgccatgatctacaccggtgcacaggcaagcgaaaccttcagcattttgggggcatttgaaaataccgacgtaaacacttcgctggtcttcggtggcacttgcggtgtgcttgccgtcgttctctgcacgctcggcacgattaaaaccgccgactatcccaaagccgtttggcagggtgcgaaatctatgttcggcgcaatcgccattttaatcctcgcttggctcatcagtacggttgtcggcgaaatgcacaccggcgattacctctccacactggttgcgggcaacatccatcccggcttcctgcccgtcatcctcttcctgctcgccagcgtaatggcgtttgccaccggcacaagctgggggacgttcggcatcatgctgccgattgccgccgccatggcggtcaaagtcgaacccgcgctgattatcccgtgtatgtccgcagtaatggcgggggcggtatgcggcgaccactgctcgcccatttccgacacgaccatcctgtcgtccaccggagcgcgctgcaaccacatcgaccacgttacctcgcaactgccttacgccttaaccgttgccgccgccgccgcatcgggctacctcgcattgggtctgacaaaatccgcgctgttgggctttggcacgacaggcattgtattggcggtgctgatttttctgttgaaagataaaaaacgcgccaacgcctga

SEQ ID NO: 68024 - DNA, 1410 bp, Neisseria meningitidis
atgatgaaaaatcgagtgaccaacatccattttgtcggtatcggcggcgtcggcatgagcggtatcgccgaagtcttgcacaatttgggttttaaagtttccggttcggatcaggcgcgaaatgccgctaccgagcatttgggcagcctgggcattcaagtttatcccggccataccgcagaacacgttaacggtgcggatgtcgtcgttacctctaccgccgtcaaaaaagaaaatcccgaagttgtcgctgcgttggagcagcaaattcccgttattccgcgcgccctgatgttggcggagttgatgcgcttccgtgacggcatcgccattgccggcacgcacggcaaaaccacgaccaccagcctgaccgcctccatcctcggcgcggcaggacttgacccgactttcgttatcggcggcaaactcaacgccgcaggcaccaacgcccgcttgggcaaaggcgaatacatcgttgccgaagccgacgagtcggatgcatcctttctgcacctgacaccgattatgtccgtcattaccaatatcgacgaagaccatatggatacctacgggcacagcgtcgaaaaactgcatcaggcgtttatcgatttcatccaccgtatgcccttctacggcaaagcctttttgtgtattgacagcgaacacgtccgcgcgattttgcccaaagtgagcaaaccttatgctacttacggtttggacgataccgccgacatctacgccaccgacatcgaaaacgtcggcgcgcaaatgaaattcaccgtccatgttcaaatgaaaggacatgagcaggggtcgtttgaagtcgtgctgaatatgcccggcagacacaacgtgctgaacgcattggcagccatcggcgtggcgctggaagtcggcgcatcggttgaagcgattcaaaaaggcttgctcggctttgaaggtgtcggccgccgcttccaaaaatacggcgacatcaagttgccaaacggtggaaccgcgctcttggtggacgactacggacaccaccccgtcgaaatggcggcgaccctttccgccgcacgcggcgcgtatccggaaaaacgtttggtactcgccttccaaccgcaccgctatacccgtacacgcgatttgtttgaagactttaccaaagtcctcaataccgttgacgcgctggtgttgaccgaagtttatgccgccggtgaagagccgattgccgccgccgattcccgcgctcttgcccgcgccatccgcgtattgggcaaacttgagccgatttactgcgaaaacgttgccgatctgcccgaaatgctgttgaacgttttgcaggacggcgacatcgtgttgaatatgggcgcgggaagcatcaaccgcgtccccgccgcgctgctggaattgtcgaaacagatttga

SEQ ID NO: 68025 - DNA, 1347 bp, Neisseria meningitidis
atgtcggataacgttccaacgattgcggcagtcgctaccgcacccgggcgcggcggcgtgggcgtgatacgcatatcggggaaaaacctgctgccgatggcagaggctttgtgtgggaaaacgcccaagccgcgtaccgcaacctatgctgattttacggacgcggacggtcaggcaatcgacagcgggcttttgctgttttttgccgcaccggcaagttttacgggcgaagatgtcatcgagcttcagggacacggcgggccggtagtgatggatatgctgctgaaccgctgtttggaattgggcgcgcgccttgccgaaccgggcgagtttacgaagcgtgcgtttttaaacgacaaactggacttggcacaggcggaaggcgtggcggatttgattgacgcatccagccgttcggcggcgcgtctggcgttgcgctcgctcaagggcgatttttcgcggcggatacacggtctggtcgaagacttgattaccttgcggatgctggtcgaagcgacgttagattttcccgaggaagacattgattttctcgaagcggcagacgcacgcggcaaactggacggcttgcgccgcgccgtggatgatgtgcttgccaacgcgcagcagggcgcgattttgcgcgaaggtctgaatgtcgtattggtcggcgcgccgaatgtgggcaagtccagcctgctgaacgcgttggctggcgacgaagtggcgattgttaccgatattgccggaacgacgcgcgacgcggtcagggaacgtatcctgattgacggcgtgccggtgcatattgtcgatacggcaggtttgcgcgagacggacgacgtggtcgagcgtatcggcatcgaacgcagccgcaaagccgtatccgaagccgatgtcgcgctggtgttggtcgatccgcgcgagggtttgaatgaaaagacacgggcgattttggacgcgttgccgccggagttgaaacgcatcgaaatccacagcaaatccgatttgcacgcacacgcggcaggcgggttcggtacgggcgcagaaaccgtcatcgcgctgtcggcgaaaaccggcgacggcttggacgcgctgaaacggacgttgttgcgcgaggccggatggcagggcgagggcgaagggctgtttttggcgcggacgcggcacgtcaacgcactcaaagcagcgcaggaagaattgtcgctggcggcattgtgcggcaaccatcaaatcgagctgtttgccgaacacttgcgcttggcgcaggtcgcatgcggcgaaatcacgggcgagtttacggcggacgacctgctcggcgtgattttttcgaggttttgtatcggaaaataa

SEQ ID NO: 68026 - DNA, 714 bp, Neisseria meningitidis
atgatggtttatataatgaatgctttcgatataaagtcgacaaagatggacgtattgtctatatctttgcatacgtcagacttgtttgatttggaagatgtgctggtcaaattgggcaagaagtttcaagagtctggtgttgttccatttgtgctggatgttcaagagtttgattatcccgagtctttggatcttgctgcattggtttcgttgttttcaaggcatggtatgcaaattttgggtctgaagcattctaatgaacgttgggctgctgcggctatgaagtatcatttgctgttttgtctgtctcattcggaaaatgttaaagaactgggtcaggttgaggtgcagaacacggaggatggtcagaaagcaaggaaaacagtattgattacatcccctgtccgtaccggtcagcaggtttatgccgaagatggcgatttgattgttacgggggcggtcagccagggggcggaattgattgcagatggcaatatgcatatttatgcgccgatgagagggcgtgctttggccggtgcaaaaggcgatacttctgcccgcatatttatccactccatgcaggcagaactggtttctgtggcgggtatttaccgtaattttgaacaggatttgccggaccatctgcacaagcagccggtacagatattgttgcaggataaccgattggttatcagtgcaattggctcagaataa

SEQ ID NO: 68027 - DNA, 501 bp, Neisseria meningitidis
ttgccacaatgccgtctgaagcctttcagacggcattatcctgccaaatgttcaaacaatatgccgaaagccaccttttacacgcacgttgcccaagttccgattttcacctgccgcctgattgcccgtgcgattcgggacggcggcaggatactggtgtggtccgattcgttcgggcagcttcaggaattggacaaaatgctttggcaatacgaggccgagagtttcattccgcacgaaatttgggaaacggaagaagccatgccgtctgaaccatccgtcctgcttgcctgcggcggcaatctgccccgaattcccgaaggcatgaccgttttgaacctgtccgacggtttttggaacaccgctccggtcttgcccgcgcgcgttttggaaatcgtcggcaacagcttggaagatctcgccgacgcgcgcgaacgctttaccgcttaccgccgaagcggttttgccatcgaacatcacggcatggagggcaaggcataa

SEQ ID NO: 68028 - DNA, 285 bp, Neisseria meningitidis; identical to SEQ ID NO: 54025

SEQ ID NO: 68029 - DNA, 1464 bp, Neisseria meningitidis
atggttattttttatttttgtgggaagacatttatgcctgcacgaaacagatggatgctgctgcctttattggcaagcgcggcatatgccgaagaaacaccgcgcgaaccggatttgagaagccgtcccgagttcaggcttcatgaagcggaggtcaaaccaatcgacagggagaaggtaccggggcaggtgcgggaaaaaggaaaagttttgcagattgacggcgaaaccctgctgaaaaatcccgaattgctgtcccgcgcgatgtattccgcagtggtctcaaacaatattgccggtatccgcgttattttgccgatttacctacaacaggcgcagcaggataagatgttggcactttatgcacaagggattttggcgcagacagacggtagggtgaaagaagcgatttcccattaccgggaattgattgccgcccaacccgacgcgcccgccgtccgtatgcgtttggcggcggcattgtttgacaacaggcagaacgaggcggcggcagaccagttcgaccgcctgaaggcggaaaacctgccgccgcagctgatggagcaggtcgagctgtaccgcaaggcattgcgcgaacgcgatgcgtggaaggtaaatggcggcttcagcgtcacccgcgaacacaatatcaaccaagccccgaaacggcagcagtacggcaaatggactttcccgaaacaggtggacggcacggcggtcaattaccggctcggcgcggagaaaaaatggtcgctgaaaaacggctggtacacgacggcgggcggcgacgtgtccggcagggtttatccggggaataagaaattcaacgatatgacggcaggcgtttccggcggcatcggttttgccgaccggcgcaaagatgccgggctggcagtgttccacgaacgccgcacctacggcaacgacgcttattcttacaccaacggcgcacgcctttatttcaaccgttggcaaaccccgaaatggcaaacgttgtcttcggcggagtgggggcgtttgaagaatacgcgccgggcgcgttccgacaatacccatttgcaaatttccaattcgctggtgttttaccggaatgcgcgccaatattggatgggcggtttggatttttaccgcgagcgcaaccccgccgaccggggcgacaatttcaaccgttacggcctgcgctttgcctgggggcaggaatggggcggcagcggcctgtcttcgctgttgcgcctcggcgcggcgaaacggcattatgaaaaacccggctttttcagcggttttaaaggggaaaggcgcagggataaagaattgaacacatccttgagcctttggcaccgggcattgcatttcaaaggcatcacgccgcgcctgacgttgtcgcaccgcgaaacgcggagtaacgatgtgttcaacgaatacgagaaaaatcgggcgtttgtcgagtttaataaaacgttctga

SEQ ID NO: 68030 - DNA, 846 bp, Neisseria meningitidis
atgctcagttacagacacgcattccacgccggcaaccacgccgatatgctcaaacacttcaccttgtttttagtgctgcaatatttcaaccgcaaagacaagccctactggtacatcgacacgcacggcggcgcgggtgtgtacaatctcgaaggcagcgaggcacaaaaagtcggcgaataccggcaaggcatcgccctacttcgacaagcaaaaaacctgccaaccgagttaaacggctttatcgcgcacatacaaaaaatcctgccctcgcccgaactttactgcggttctccgtggctggcgcaatcgctgacccgcgtcggcgacaaattacgcctgtttgagctgcaccccaccgactttgtccatctgcaaaacaatatgggcgaagcaggattgggcaaacgcggacaagtgttgcgcgaagacggttacaaagagctgatttccctgctgccgcccccgccgcgccgcgccaccgtcctcatcgacccgccctatgaggaaaaacaggactaccggcgtgtaacggaaacgctgaaagccgctttaaaacggtttgagtccggctgttatctcatttggtatccctgcctcagccgcgaagaaagccgcaagctgcccgaagaattgaaaaaactcctgcccgacaactaccttcacgccgaacttcacgtccacgcgccgaaagccgacggtttcggtatgcacggcagcggaatgttcgtcatcaatccgccctatctgttggcggaacaattggcggcaaacctccccgccctgacgcggctgctggcgcaagacgaaggcgcgcgctaccttttggacagcaaaatccgctga

SEQ ID NO: 68031 - DNA, 3210 bp, Neisseria meningitidis
atgttttatctgtatcaatccaaccatcttgaaacgctggcggcattgtttgcccgcattcaaaaagtcaaaccgctgaaatcggctttacagcccgaacagattattgtgcagagtcaggggatgcgccgctatctcaatacctgcctcgcccgcgatttgggcgtggcggcgaatttgtcgttcagcctgcccgccggcctgacgtggaagctgatgaaaaaactgattcccggtattccggaactcagcccgtttgcacccgaagtcatgcgctggcggctgctggatttgttccgcagtgaagcattccggaatacggcagaatttgaagatgtgaggaatgtgctgcaagactatctgggcagcggcgaatcggcagattaccagcttgcgggacagcttgcggacatattcgaccaatacctcgtgtaccgtcctcagtggatagacgcttggcagcagggcaggcggctcggtttgggcgacgacgaaatctggcagtccaaactgtggcgttacctcgacgatggcaggcagagcgcgccgcaccgtgtcgcgttgtgggaaaagctgcttgccgcgttggacaaggataagctgcccgagcgttatttcgtgttcggcatttccacgatggcgccgatgtatcttcagcttttgcacaagctgtccgaacattgcgatgtgttcgtgttcgcactcaatccgagcgggatgtattggggcaacgtcatcgaagcggcgcaaatcctcaaaggcggcggcgatcccgatttaactcaggcagggcatccgctgctcgcctcattgggcaagcaggggcgcgactttttcgactttttgaacgaaatggaaatagaaggcgaaacgccggtatttgaagaaggcggacgcgatacgcttttgcacgccctgcaaaccgatattcaaaacctgaaaatgccgtctgaaaatgtgggaagcgtcaacacgggcgacggctcgatacgcatcgtctccgcacacagccccttgcgcgaattgcagatactcaaagacaagctgttgaaaattctgcatgaacatcccgattggcagccgcatgatatcgccgtattaaccccgaacatcgaatcctatacgccttttatcgaagccgtgttcggacaggcgcagcccggtgcgcaggcattgccgtattccgtttcggacgtgaaaataagccgccgacaaccgctgtttcatgctttgtcatgcctgttcgacttgttggaaagccgatttgaagtcgataaagtgcttgtgcttttagaaaccgcacccgtgttgcgccgtttcggactgactgaggacgatttgccgcttttgcacgacatggttgccgatttgaacgtccgctggggtttggacggagaaatgcgcggcggcacggatcagctgtttacctggaagcaggcggtagaacgcatgatattgggctggatgctgcccgaaggcggcaatccgatgtggcaggatgtcagcgcgtggtatgccgacgtgaaccaaaccgccctgttcggacgttttgccgccctcctcgaaaccctgtcggatattgtacggatatggcagcaacctgcgacggtcggcgaatgggtggcgcgttgccgggatttgcttgaaacattgttccaaaccgaagccgatgaccaaaaggcagtccaaaacctcgaaaacgaatgggtcaaatggcaggcggaaaccgaattggcgcaattttccggacagttgccgccgcacaccgtcatccgccacatccgccgctttctcgacagcgaaagcgaggcaggctttttacgcggcggcatcaccttttgcagtatggtgccgatgcggagcctgccctttaaagtcatctgtctgttgggtttgaacgacggagattttccccgcaataccaaagccgccgtattcgacctgattgccaaacatcccgccaaaggcgaccgcgcccgccgcgacgacgaccgctacctcttcctcgaagccctcatcagcgcgcgtgaaatcctgtacctgtcctacatcgggcgcgacatccgcaaagacgaagaactggctccgtcttctttgttgggcgaactcatcgataccgttgccgctatggcgggcatcggtagccgccaacttgcacaaaacctgatagaacagcatccgctgcaagccttctcgcgccgatattttcaagaaggcggacgttcagacggcatattcggcacgcgtaccgactacgccgccgcgctcggacaaacgcccgaaccgccgcaaccctttttcgaccaatccgtagaaaacgccgaacctgttgccgaaatcggacaggacgaatttatccgcttctggcgcaaccccgtcaaagtatggcttcagcagcagcttgcgtggagcgaaccccatatcggcgaagcttgggagcctgccgaacccttcgagccgcaacacgccgatcaaatcgccgaaacctacatcgaagcacggcgcgaaggacgggattttgcccaaaccgccgcccgcatcggggcggaaagcctcctgccgtcgggagagttgggcagactttggcagcaggacttccaaaccgctgccaaacaaatcgacacggcggttttaaacagccccaaactgccaccgctttcatatgccataccgtcggacgggcaaatcctgaaaggcagcttgggcaatctgtaccgctgcggacaagtgttttacgcctacggcaaacccaacgcgccgcaacgtatcgcttttctgctggaacacctgatattttgcgccgttatgccgtctgaagccgaaacgcggcaaacctttatcgtccaatccggagaaaccgaaatattggcggaaatcgcgcaagacagggcattgcagctattgttggaatggattgcattttttaatatcggacaaaaccgccccttgccgttttttgccaaaacctcgcttgccgccgccgaagcgtttgcccaaaaacaagattgggaagccgccctgaaaaaagcccaaaccgcctattacggcagcaaagtcagcaaagggcagaaagactataccgaagtcgccctcgtgttcggcaacgcaagccaaaacccgctcgaacagcccctgtttgaaaacctcgtccgtctgcttgccgacacgtttgccgcagcggaaaaaaaggaagaggccggagcagcctga

SEQ ID NO: 68032 - DNA, 549 bp, Neisseria meningitidis; identical to SEQ ID NO: 36303

SEQ ID NO: 68033 - DNA, 1359 bp, Neisseria meningitidis
atgaaaccactggatctaaatttcatctgccaagccctcaagcttccgatgccgtctgaaagcaaactcgtgtcgcgcatcgtaaccgacagccgcgacagccgcgcgggcgatgtgtttttcgcattggcgggcgggcggtttgacgcgcatgattttgttgaagacgtattggctgctggtgcggcggcggttgtggtttcgcgcgaagattgcgttgcaatggatggcgcgttgaaagtcgatgacacgcttaccgcgttgcaaatgttggcgaaggcgtggcgcgataatgtgaatccgtttgtgttcggcattaccggttcgggcggcaagacgacggtgaaggaaatgctggctgcggtattgcgccgccgtttcggcgatgatgccgtgttggcgacggcaggcaacttcaacaaccatatcggattgccgctgactttgttgaagttaaacgaaaaacaccgctatgccgtgattgaaatgggcatgaaccatttcggcgaactggcggttttaacgcaaatcgccaaaccaaatgccgcattggtcaacaacgccatgcgcgcccatgtcggctgcggtttcgacggagtgggcgatattgccaaagcgaaaagcgagatttaccaaggtttatgttcagacggcattgcactgattcctcaagaagatgccaatatggctgtcttcaaaacggcaacgcttaatttgaatacgcgcactttcggcatcgatagcggcgatgttcacgcggaaaatattgtgctgaaaccgttgtcgtgcgaatttgatttggtgtgcggcgacgaacgcgccgccgtggtgctgcctgttcccggccgccacaatgtccacaacgccgccgctgccgccgcgctggctttggctgcgggtttgagtctgaacgatgtggcggaaggtttgaaaggtttcagcaatatcaaaggccgtctgaacgtcaaagccggcatcaagggcgcgaccctgattgacgatacttataatgcgaatcccgacagcatgaaagccgcgattgacgtgttggcgcgtatgcctgcgccgcgtattttcgtgatgggcgatatgggcgaactgggtgaggacgaagccgccgccatgcacgccgaagtcggcgcgtatgctcgcgaccaaggcatcgaagcggcttattttgtcggcgacaacagcgtcgaagcggcggaaaaatttggcgcggacggtttgtggttcgccgccaaagacccgttgattcaagtgttgcgccacgatttgcccgaacgcgccaccgtgttggtgaaaggttcgcgctttatgcagatggaagaagtggtcgaggcattggaggataagtga

SEQ ID NO: 68034 - DNA, 2220 bp, Neisseria meningitidis
atgtgtaaaccgaattatggcggcattgtcttgttgcccttacttttggcatcttgtatcggcggcaatttcggcgtgcagcctgttgtcgaatcaacgccgaccgcgtaccccgtcactttcaagtctaaggacgttcccacttcgccccctgccgggccttcggtagaaaccacgccggtcaaccggcccgccgtcggtgcggcaatgcggctgttgaggcggaatatcgcaacttctgataaggatggcaatgattttccaaatagcagacaagcagaagaaaagctgtcgtttaaagaaggtgatgttctgtttttatacggttccaaaaaagatcaacgtcagcagcttgaagatgaaattcgtcaacgcaatcctaatgtacaaattaggacatcagaaaatgaaaataaaaaatatggttataactttgtagatgcaggttatgtatatgtaaagggagaagatgaaattgagaggacttcaaattacaagtattttactcaccggtttggttatgatggttttgtatattattccggagaacatccttcgcaatctttaccgagcgcgggaacggtaaaatatttcggtaactggcaatatatgaccgatgccatacgtcatcggacaggaaaagcaggagatcctagcgaagatttgggttatctcgtttattacggtcaaaatgtcggagcaacttcttatgctgcgactgccgacgaccgggagggggagggaaaacatcctgccgaatatacggttgatttcgacaaaaaaatcctggagggcaagctgattaaaaatcagtatgtgcaaaggaaaaccgatcaaaagaaaccactgaccatttacaacattactgcaaaattggacggcaaccgctttaccggcagtgctagtgtcaatcctgatttagcgaaaaaccatgccaataaggagcatttgtttttccataccaatgccgatcagcggcttgagggcggttttttcggcgataacggagaagagcttgccggacgatttatcagcaacgacaaaagcgtattcggcgtattcgcaggcaaacaaaaaacagagacagcaaacgcatcagatacaaatcctgccctgccgtctggaaaacacaccaaaatcttggattctctaaaaatttccgttgacgaggcaagtgataaaaatccccgtgagtttgccatttcctctatgcccgattttggtcatcccgacaagcttcttgtcgaagggcgtgaaatctccttggtcaaagatactcaaaccattgatcttgccgacggcaggaaaatgaccgtcagtgcttgttgcgactttttgacctatgtgaaactcggacggataaaaaccgatcgtcccgccgccaaaccgaaggcgcaggatgaagaggattcgggtattaataacggtgaagaaagcgaagacgaagacgaagtcgtcgaagaagaagccgaagaagaagctgatgaagctgaagctgatgaagctgaagatgaggaagctgaagaaatcgaagaagaagctgaagaggaagaaaccgaagaaaaatcgccggcagaaggcaacggcggttcaggcagcatcctgcccgctccggaagcccctaaaggcagggacatcgaccttttcctgaaaggtatccgcacggcagaaacgaatattccacaaactggaaaagcacactataccggcacttgggaagcgcgtatcggcacacccattcaatgggacaatcaggcggataaagaagcggcaaaagcaaaatttaccgttgatttcggcgggaaatcgatttctggaacgctgacggaggaaaacggtgtagaacctgctttctatattgaaaaaggtgtgattgatggcaacggtttccacgcgacagcacacactcgggataccggcatcaatctttcgggaactggttcgactaatcctcaacgtttcaaagccagtaatcttcgtgtagaaggaggattttacggcccgcaggcggaggaattgggcggtattattttcaataatgatgggaaatctcttggtataactgaaggtactgaaaataaagttgatgttgatgctgaagttgatgctgaagttgatgctgaagttgatgttgatgttgaacagttaaaacctgaagctaaaccccaattcggcgtggtattcggtgcgaagaaagataataaagaggtggaaaaatga

SEQ ID NO: 68035 - DNA, 417 bp, Neisseria meningitidis; identical to SEQ ID NO: 36667

SEQ ID NO: 68036 - DNA, 501 bp, Neisseria meningitidis
atgagaaaaagtcgtctaagccggtataaacaaaataaactcattgaactgtttgtcgcaggcgtaactgcaagaaaggcagcagagttagtaggcgttaataaaaataccgcagcctattattttcatcgtttacgattacttatttatcaaaacagcccacatttagaaatgtttgatggcgaagtagaagtagatgaaagttattttggcggacaacgcaaaggcaaacgcggtcgcggtgctgccgataaagtcgccgtattcggtcttttgaagcgaaatggtaaggtttatacggttacagtaccgaatactcaaaccgctactttatttcctattatccgtgaacaagtgaaacctgacagtattgtttatacggattgttatcgtagctatgatgtattagatgtgcgcgaatttagccattttagcttcgctgaaacttcgttttcgtatcaatcacagcccccattttgctgaacgacaaaaccatattaa

SEQ ID NO: 68037 - DNA, 501 bp, Neisseria meningitidis
atgagaaaaagtcgtctaagccggtataaacaaaataaactcattgaactgtttgtcgcaggcgtaactgcaagaaaggcagcagagttagtaggcgttaataaaaataccgcagcctattattttcatcgtttacgattacttatttatcaaaacagcccacatttagaaatgtttgatggcgaagtagaagtagatgaaagttattttggcggacaacgcaaaggcaaacgcggtcgcggtgctgccgataaagtcgccgtattcggtcttttgaagcgaaatggtaaggtttatacggttacagtaccgaatactcaaaccgctactttatttcctattatccgtgaacaagtgaaacctgacagtattgtttatacggattgttatcgtagctatgatgtattagatgtgcgcgaatttagccattttagcttcgctgaaacttcgttttcgtatcaatcacagcacacattttgctgaacgacaaaaccatattaa

SEQ ID NO: 68038 - DNA, 2256 bp, Neisseria meningitidis
atgggacagtacaagaagctgtggtacttgctgtttgccgttctggcggtatgctttaccattcttggctatatgggcagcgaggtttacaaaaaagccccgccttaccccgaacaggtcgtttccgcatccggcaaggtcttgatgacgaaagacgatattttggcaggtcagtctgcatggcagactactggcggtatggaagtcggttcgattctgggtcacggcgcatatcaggctccggactggacggccgactggctgcatcgtgagttgtccgcttggttggatttgaccgcgcaacagacttacggcaaaaaatttgatgaagtttcccctgaagaacaagccgttctgaaaacccgcctggctgacgaataccgcaaccaaagccgtgtgaaagaagacggcagcgtcgtcatcagcgatacgcgcgtaaaagccatcgaaagcatcctgccttattaccacggcgtttacggcgacgatcccaagctgcaaaccacccgcgaacactttgcaatgaaaaacaacacattgccaagccaagaagcgcgtgaaaaactgttcgacttcttcttttggacttcttggtctgcttcgaccaaccgtcctgacgagacgttcacttataccaacaactggccgcacgagcctttgatcaacaatgtaccgactactgaaaactacatgtggtcgtttaccagtgttgtactgctcttgatgggcatcggtttgttgatgtggggttattccttcctgaccaaacacgaggaagtggaagtgccgtctgaagacccgatttccaaaatccaactgaccccttcgcaaaaagcattgggcaaatacgtcttcctgacggtcgccctgtttgtggtacaagtattgctgggcggactgaccgcgcactacaccgtcgaaggccagggtttctacggcattgacgaggcgttgggctttgaaatgtccgactggttcccctacgccctgacccgtacttggcacatccaatccgccatcttctggattgcaaccggctttttgacggcaggtttgttcctcgcgccgattgtcaacggcggtaaagatcccaagttccaacgtgccggcgtaaacttcctctatatcgccctcttcatcgtggtcggcggttcttacgcgggcaacttcttcgcgttgacgcacatccttcccccggaatttaacttctggttcggacaccaaggttacgaatacctcgatttgggacgtttctggcaactccttttgatggtcggtctgctgttatggctgttcctgatgttgcgttgcacggtttccgcctttaaagaaaaaggcgtggacaaaaacctgttggctatcttcgtagcttctatggtcggcgtgggcgtgttctacgcgccgggtctgttctacggtgaaaaatccccgattgccgttatggaatactggcgttggtgggtggttcacctgtgggtagaaggcttcttcgaagtatttgccactgccgcctttgcctttgtcttctacaatatgggctttgtccgccgcagtaccgccactgcctccactttggccgctgccgccatctttatgttgggcggcgttccgggtacgctgcaccacctgtacttctccggctctacctccgcctctatggcaatcggtgcctgcttctccgctttggaagtcgtgccgctggtgttgctgggccgtgaagcatacgaacactggtcttaccaacacctgtccgactgggcgaaacgcctgcgttggccgctgatgtgcttcgtggcagtcgccttttggaatatgatcggtgccggcgtattcggcttcctgatcaatccgccgatttccctgttctatatccaaggtttgaacacttctgccgttcacgcgcacgccgccttgttcggtgtgtacggtttcttggcattgggcttcgtattgctggttgcccgttatttgaaaccgaacgcgcagtttgacgacaaactgatgacttggggcttctggctgctcaacggcggcttggtcggtatgattgccatcagcctgctgcctgtcggcgcgattcaggcatacgcctccatcacgcacggtctgtggtatgcccgcagcgaagagttcctgcaaatggaaatcctcgataccttgcgttgggtacgtacggcagctgacttggtctttatcggcggtgcaatctgcgttgccatccaagccactaaaatcgtattcggccgcgacaaataa

SEQ ID NO: 68039 - DNA, 453 bp, Neisseria meningitidis; identical to SEQ ID NO: 45863

SEQ ID NO: 68040 - DNA, 507 bp, Neisseria meningitidis; identical to SEQ ID NO: 45448

SEQ ID NO: 68041 - DNA, 987 bp, Neisseria meningitidis
gtgagtggagcagaaagttaccggcatatcacggtcttgctgaatgaggcggtggatgcgcttgccgtgcgcgaagacggtgtctatgtggacggtacgttcggcaggggagggcattcccggctgattttgtcgcgtttgggcgatgcggggcggttgattgttttcgacaaagaccctcaggcgattgctgtagcagaagagctggcgcgttcggacaaacgggtcggtgtcgtgcatggcggttttgcttcgtttcagacggcattggacggtttgggtatcggcaaggtggacggtgcgctgtttgatttggggatttcgtctccgcaaatcgatgacggcagccgcggtttcagctttcgtttcgatgcccctttggatatgcgtatggatacgacgcgcggtatgtctgccgcagagtggatagcggttgtgtcggaacaggatttgcacgaggtaatcaagaattatggtgaagagcggtttagccgccagattgcgcgcgccattgttgcgcaacgggcggaaagtccaatcgatacaacccgcaagctggcgcagatcgtggcacaaaacgtccgtactcgcgagcgggggcaggatcctgcgacgcgcaccttccaggcggtccgcatctttattaaccgcgagcttgaagaagtaggggcagtattgccgcaggtcatgtgtcgtctgaaagagggcggacgtttggcggtcattgctttccattcgttggaagaccgcattgtgaagcagtttgtcaaaaaatattcgcaacacgcgcccctgccgcgctgggcggcggtcagggaagcggatttgcccgagctgcccctgaaaatcgtgggcagggcattaaagccgggtgaggcggaaattgccgccaatccgagggcgagaagtgcggttttgcgtgtggcggagcggactgccggtccgataccggaacaatcacagagaaaaacgtctgaatggcaatga

SEQ ID NO: 68042 - DNA, 390 bp, Neisseria meningitidis
atgttatataaatgtaaaatcaaaaagttagataacaccattgaagaggcagtattgattgaaataaatggttatgaactacattgttttatatcatactgcccattcaaaatatttgaaaatcaattttatgaagtggaattatcctatgaaatctttaatgattacatactggataaatcaacttcaaatattggatttagaaaaatagatgatagtttcaagtatgaaataacggcagaattaaaaaataatcatctaaccctacaaaatatacaatttgaagaagatgagtatttagtaaactactcttatcttgataattgtttggttacattaacggctgatagaataagtgtttcatttattagagaaattcaggcagcctga

SEQ ID NO: 68043 - DNA, 795 bp, Neisseria meningitidis
atgatgtccgaacaccgagtcaaccacgaacccgtcttcctgttggcttcctcgccctggcgcgaaagcagcctgcgggtcgaagcgttcagccgccgttacgggcgtgtggcacttttggcaagaagcgcgcgcaaacggcagagcgaattgcgcggcgtgctggttcctttcgtgcccgtcagtgcgtcgtggtacggcagtcaggaactcaaaacccttcaccgtgccgaatggggcggcggatggcggcagccgcagggcagggcgttgttcagcggtctgtatgtgaacgaactggtgttgaaactgaccgcgcgcgaagatccgatgcccgaactgtacgacgcgttggcaaaagtgatggaggcggtgtgccgtgaagccaaccatattgccgatttgcgccgcttcgagtggaagctgctcaatgccttgggcgttgcccccgatttgcacgccgacggcacgggcggcgatattttggcggacaaaacctaccggctgatgcccgaagaggcggtcatgcccgtatgcgaggacgcagacgcgctttcgcacgaagccggcgcaattgtcgaagggcaaagcctgatcgatttgcgcgaaggcagtttccgcaccgccgaaagcctgcaacaggcattgaaaatcacacggctttttatccgccacctgttgcccgaggggctgaaatcgcggcaggtgttggaacagatacggcagtttgaccgcaaagaaaccgcccgggaaaccgtcccgacttcggacggcacggcttcaaatgccgtctga

SEQ ID NO: 68044 - DNA, 519 bp, Neisseria meningitidis; identical to SEQ ID NO: 36779

SEQ ID NO: 68045 - DNA, 492 bp, Neisseria meningitidis
ttgaaaaaccatccgcccgtcgccgccttcccatcgcaggaagaaatggaacacttcatgcgcgaagcactgcgccaagcagaacaatccgccgccgacggcgaaatacccgtcggggcagtcattgtttcagacggcaaaatcatcgcatcggcacacaacacctgcattgccgactgcaatgtcagccgacacgccgaaatcaacgccttggcacaggcaggcagagaaatacaaaactaccgccttgacggatgcgacatatatatcaccctcgaaccctgcgccatgtgcgcgtccgcactgatacaggcacgaatcaggcgtgtgatatatggtgcggcagaacccaaaaccggcgcggcaggcagcattgtcaacctgtttgccgacaaacgcctcaatacgcacaccgccatacggggcggaatcctgcaagaagaatgccgcgccgtattaagccgtttttttcagaacaaaagaaaaggttga

SEQ ID NO: 68046 - DNA, 789 bp, Neisseria meningitidis
atgaaccatcaggacgcacgctggcaggtttaccgccatcttgccgaacataccgaccaacgcctgacactcgtccgcaacgcgcccaagtatatcctgcttgcaggtgcggatgcggacatcagccgcagcctgttggcgaaacgctatccgcaggcggtatttgaagaatacgattcccgtgcggattttttggcggctgccgctgccgcccgcaaaggcggtttttggcaaaggtttacgggtaagggcgtggtgcaacactgccaatccccgatcgcgccgctgcccgaagcgtgtgccgatatgttgtggtcgaatctcggactgttggcggcggaacaaatccttcctgtgctgcacaactgggcgcgcgccttgaagacggacgggctgctgttttttacctgcttcgggcgcgacacttttaccgaactgaaatgccgtctgaaagaaaacggcattgaaagccgcagcgtgatgtttcccgatatgcacgacttgggcgatatgcttgctgaaaacggcttttacgaccccgttaccgatacggcgaagctggtgttggattacaaaaaggcggaaacgttttgggcggatatggacacgctgggcgtttggcgggcgatggcgtggaacgatgaaaacgccgcgcgttcgtgtgtcgggacaatatttgagcgggaaggcggtttgggcattacgctggaaacggtgtacggacacgccgtgaaaaaactgatgctgccgcaaggggagaacgtggtgcagttttttccgaagagatga

SEQ ID NO: 68047 - DNA, 1035 bp, Neisseria meningitidis
atgagtacttcattgagttaccgcgatgcaggtgtcgatatcgacgcaggcgaccaactggtcgaaaacatcaaaccttttgccaaacgcacgatgcgcccggaagtattgggggatttgggcggcttcggcgcgttggtcgaaatcggcaaaaaatatcaaaaccccgtattggtcagcggtacggacggcgtaggtaccaagctcaaacttgccttcgattgggacaaacacgatacggtgggcatcgaccttgttgcaatgagtgtcaacgacattttggttcaaggagctgagccattgtttttcttggattattttgcctgcggtaaattggatgttccgcgcgcgaccgatgtcatcaaaggcattgcacaaggttgcgaagaatccggctgcgccctgattggcggggaaactgccgaaatgccgggtatgtatcccgttggcgaatacgatttggcaggttttgccgtcggcgtggtggaaaaagagaatgtcattaccggccgcagcatcggcgcgggcgatgtggtattgggtttggcttccaacggcgcacattcaaacggctattcccttatccgtaaaatcatcgaacgcgacaatcccgatctggatgccgagtttgataatggcaaaaccttgcgtgaggccgttattgcgccgacccgcctgtatgtgaaaccgattcttgccgctttggaaaaatttaccattaaaggtatggcgcacattaccggcggcggcattaccgaaaacgtgccgcgcgtattgcctgaaaacacggttgcacaaatcgatgccgaatcgtgggaattgcccaagctcttccaatggcttcaaaaggcgggcaatgtggaaacccaagaaatgtaccgaacctttaactgcggcatcggcatggtcgttattgttgctgccgaagatgccgatgcggttcagggtctcttgggtgaacaaggtgaaacagtttaccgtttaggtttgatccgtgagcgtcagggagacgagcatcaaacccaggttgcctga

SEQ ID NO: 68048 - DNA, 318 bp, Neisseria meningitidis
atggtagtacgcggcggaatctatctggtctccttagacccgaccgtaggaagcgaaatcaaaaagacacgtccttgtgtcgtagtatctcctcctgaaatacacaactatctcaagactgtgctgatcgttcccatgacgagcggaagccgtcctgccccgttccgcgtcaatgtccgctttcaggataaagacggtttgcttttgcccgaacagattagggctgtggataaagccggattggtcaaacatcttggaaatttagacaacagtacggctgaaaaactgtttgcagtattgcaggagatgtttgcctga

SEQ ID NO: 68049 - DNA, 918 bp, Neisseria meningitidis
gtgaaaaaaaccaaagtccacctgatttcaggttttctgggaacaggcaaaaccaccgcgctcaaaagcctgatggcgcaaaaagacccgaacgaaaaatgggtcatcatcgtcaacgagttcggcgaaatcggtattgacggcgcggtattgagcgacaacggcatccctgtggcagaaatcgccggcggctgtttgtgttgcaccgccggcccgcaaatgggcgtaaccgtgcagaaaatgctgcgcgatgccaagcccgaccgcctgatgattgaggcaagcggactggcgcacgcagccagcgtcatcgacgaattgaaagccaaaccgctggacagccttttggaaatcggcgccgtctttaccgtcgtcgatccgcgccagttcatcaaccccgattacgcgcaacaggcgttgtataaagaccaaatcggcatctgcgacatattggtcgccagcaaaaccgatttatgcacccccgaacagctggtcgaatttcacgacaaagcggcaaaactgttcccgcccaaagccaaagtggtcgaagtccgaaacgcgcaactcgatatccaatggctcgatattcccgtcatcgaaaaatcacgctaccgcctcaaagccctgccggacaacacgatgggcttccagtcgcaaggtttcacattccccgccggacgcgatttcgacggcgaaaaattgaccaacttcttcaatgatttgcccaagatgaccgaaggactcgtccgcgccaaaggcgtgtttcaagtactcggcacttgggtgtggctcaactgggtggacgggcaatggggtgcgaaccaagtctcatggcggcgcgattcgcgttttgaattgattgccaaatcgtttgatgcggatttaatcgaacaaaagctcaaagacgcattggaatag

SEQ ID NO: 68050 - DNA, 387 bp, Neisseria meningitidis; identical to SEQ ID NO: 43260

SEQ ID NO: 68051 - DNA, 330 bp, Neisseria meningitidis
atgtttgatggcgaagtagaagcagatgaaagttattttggcggacaacgcaaaggcaaacgcggtggcggtgctgccggtaaagtcgccgtattcggtcttttgaagcgaaatggtaaggtttatacggttacagtaccgaatactcaaaccgctactttatttcctattatccgtgaacaagtgaaacctgacagcattgtttatacggattgttatcgtagctatgatgtattagatgtgagcgaatttagccattttagcttcgctgaaacttcgttttcgtatcaatcacagcacacattttgccgaacgacaaaaccatattaa

SEQ ID NO: 68052 - DNA, 486 bp, Neisseria meningitidis; identical to SEQ ID NO: 37367

SEQ ID NO: 68053 - DNA, 174 bp, Neisseria meningitidis; identical to SEQ ID NO: 36913

SEQ ID NO: 68054 - DNA, 396 bp, Neisseria meningitidis; identical to SEQ ID NO: 39895

SEQ ID NO: 68055 - DNA, 1311 bp, Neisseria meningitidis
gtggctaatcaacaaacgtcatcaggttcatccaaatttggagatcttaagaaacgtcttttgtttctatttggagcattgattgtttttcgaattggtgcccatatacccgtacctggagttgatgctgttgctttagctaaattatacgaaagcgctggaaacggcatcctgggaatattgaatatgttttccggtgggtcgttagagcgctttagtatatttgcaataggaattatgccatatatttcagcttctattattgtacagctcgcttctgaaattttgccatcattgaaggctttaaaaaaagaaggggaggctggtagaaaggtaattacgaaatatacgaggtatggtactgttttgttagcaattcttcaaagtctaggtgttgcatctttcgtatttcagcaaggaattgttgtaacaagttcatttgagtttcatgtttccacggtagtttctttggtaacgggaaccatgtttcttatgtggcttggggagcaaattactgaaaggggtatcgggaacggtatttctttaatcattacggcaggtattgcttcaggtattccttcgggtattgcaaagctggttacactgacgaaccaaggttctatgagcatgcttacggcgttgtttattgtatttggtgccttattattaatttatttggttgtatactttgaaagtgcacagcggaagattcctattcattatgcaaaacgccagtttaatggtagggcgggtagtcaaaatacgcatatgcctttcaagttgaatatggctggtgttattcccccaatttttgcttccagtattattctatttccatctactcttttaggttggtttggttcggctgatacaaatagtgttttgcacaaaatagctggattgttacaacacggtcaattgctgtatatggctttatttgcagcgacagttattttcttttgttatttttatacggctttggtttttagccctaaagaaatggcagagaatttaaaaaagagtggtgcttttgttcctgggattagacctggtgagcagacctctaggtatttagaaaaagttgtattacgtttgacattgtttggagctctttatattacaactatttgtttaattccagagttcttaactacggttttaaatgtacctttttatttgggtggcacgtctttgttgattctagttgttgtaacgatggattttagtacacaaataaattcgtataggcttactcaacagtatgataagttaatgactcgttcagaaatgaaatcattttctcggaaatag

SEQ ID NO: 68056 - DNA, 606 bp, Neisseria meningitidis; identical to SEQ ID NO: 39881

SEQ ID NO: 68057 - DNA, 1722 bp, Neisseria meningitidis
atgccgtctgaagccatctgttcaaagaaaactatgctcaataaagaccaatttgcggacaaccattttatccgcaccatcatcgaagacgacctcaaaagcggcaaacacgaagccgtccaaacccgttttccgccggagcccaacggctacctgcacatcggacacgccaaatccatctgcctgaacttcggtttggcgtatatttacgacggcttgtgcaacctgcgttttgacgataccaaccccgaaaaagaaaacgacgaatacgtcaacgccatcaaagaagacgttgagtggctcggtttccattgggcgggcgagccgcgtttcgcttccaactatttcgaccagctttatgactacgccgtcggtttggttaaagacggcaaagcgtatgtcgatgatttgacgccagaagaaatgcgcgaataccgcggtacgctgaccgaagcaggcaaaaacagcccttatcgcgaccgcagtatcgaagaaaacctcgacctgttcacgcgcatgaaaaacggtgagttccccgacggcagcaaaaccctgcgcctgaaaatcgacatggcatccggcaacatcaatatgcgcgatccggtcatctaccgcatccgccgcgcccatcaccacaacaccggcgacaaatggtgcatctatccgatgtacgactacacgcattgtatttccgatgccatcgaaggcatcacgcattccttgtgtacgctcgaatttgaagcccatcgtccgctgtatgactgggtgttggacaacatccccgcgccgcacgccacacgtccgcgccaatacgagttttcacgcttggagcttttgtacaccattacctccaaacggaaattgaatcagttggttgtggaaaaacacgtttccggctgggacgatccgcgtatgccgaccatttccggtatgcgccgacgcggctacacgcccgaagggctgcgcctgtttgccaaacgcgccggtatttccaaatctgaaaacatcgtcgatatgagcgtgttggaaggcgcgattcgcgaagagttggaaaattccgccccgcgcctgatggcggtgttgaacccgctcaaagtaaccctgaccaattttgaagccggtaaaacccaaagccgtcgtgccccgttccatccaaaccacgaggaaatgggcgatcgcgaaattcctgtgtcccaaaccatctacatcgaagccgacgactttgccgaaaatccgcccaaaggcttcaaacgcctgattcccggcggcgaagtacgcttgcgccacggctatgtcatcaagtgcgatgaagtcgtcaaagacgaagcaggcaatgtggttgaactcaaatgcagcatcgaccacgacaccttgggcaaaaatccagaaggccgtaaagttaaaggcgtgattcattgggtttccgccgaacacgccgccgaaatcaaagtccgtctgtacgaccgcctctttaccgtcgagcgtcccgatgccgtgcgcggcgaagacggcgaatacctgccgttcaccgatttcctcaatccggaatccgtcaaggaaatcaccgcctacgccgaacctgccgccaaagatttgccggcagaaagccgttggcagttcgagcgtatcggctacttcgtaaccgaccgcaaagaccacggcaaagacacgccggtgttcaaccgcacggtcacgctgaaagattcttggcagcctaagtaa

SEQ ID NO: 68058 - DNA, 405 bp, Neisseria meningitidis
atgagaaaaagtcgtctaagccggtataaacaaaataaactcattgagctatttgtcgcaggtgtaactgcaagaacagcagcagagttagtaggcgttaataaaagtaccgcagcctattattttcatcgtttacgattacttatttatcaaaacagtccacatttggaaatgtttgatggcgaagtagaagcagatgaaagttattttgctgaacgacaaaaccatattaatggaattgagaacttttggaaccgggcaaaacgtcatttacgcaagtttaacggcattcccaaagcgcattttgagctgtatttaaaggggtacgaacggcgttttaacaacagtgagataaaagttcaaatttccattttaaaacaattagtaaaatcgagtttatcctag

SEQ ID NO: 68059 - DNA, 1746 bp, Neisseria meningitidis
atgttgattaagagcgaatataagccccggatgctgcccaaagaagagcaggtcaaaaagccgatgaccagtaacggacggatcagcttcgtcctgatggcaatagcggtcttgtttgccggtctgattgcccgcggactgtatctgcagacggtaacgtataactttttgaaagaacagggcgacaaccggattgtgcggactcaaacattgccggctacacgcggtacggtttcggaccggaacggtgcggttttggcgttgagtgcgccgacggagtccctgtttgccgtgcctaaagagatgaaggaaatgccgtctgccgcacaattggaacgcctgtccgagcttgtcgatgttccgattgatgttttgaggaacaagctcgaacagaaaggcaagtcgtttatctggattaagcggcagctcgatcccaaggttgccgaagaggtcaaagccttgggtttggaaaactttgtatttgaaaaagaattaaaacgccattacccgatgggcaacctgtttgcacacgtcatcggatttaccgatattgacggcaaaggtcaggaaggtttggaactttcgcttgaagacagcctgcatggcgaagacggcgcggaagtcgttttgcgggaccggcagggcaatattgtggacagcttggactccccgcgcaataaagccccgaaaaacggcaaagacatcatcctttccctcgatcagaggattcagaccttggcctatgaagagttgaacaaggcggtcgaataccatcaggcaaaagccggaacggtggtggttttggatgcccgcacgggggaaatcctcgccttggccaatacgcccgcctacgatcccaacaggcccggccgggcagacagcgaacagcggcgcaaccgtgccgtaaccgatatgatcgaacccggttcggcaatcaaaccgtttgtgattgcgaaagcattggatgcgggcaaaaccgatttgaacgaacggctgaatacgcagccttataaaatcggaccgtctcccgtgcgcgatacccatgtttacccctctttggatgtgcgcggcatcatgcagaaatcgtccaacgtcggcacaagcaaactgtctgcgcgtttcggtgccgaagaaatgtatgacttctatcatgagttgggcatcggtgtgcgtatgcactcgggctttccgggcgaaactgcaggtttgttgagaaattggcgcaggtggcggcccatcgaacaggcgacgatgtctttcggttacggcctgcaattgagcctgctgcaattggcgcgcgcctataccgcactgacgcacgacggcgttttactgccggtcagctttgaaaaacaggcggttgcgccgcaaggcaaacgcatattcaaagaatcgaccgcgcgcgaggtacgcaatctgatggtttccgtaaccgagccgggcggcaccggtacggcgggtgcggtggacggtttcgatgtcggcgcgaaaaccggcacggcgcgcaagttcgtcaacgggcgttatgccgacaacaaacacatcgctacctttatcggttttgcccccgccaaaaacccccgtgtgattgtggcggtaaccattgacgaaccgactgcccacggttattacggcggcgtagtggcagggccgcccttcaaaaaaattatgggcggcagcctgaacatcttgggcatttccccgaccaagcccctgaccgccgcagccgtcaaaacaccgtcttaa

SEQ ID NO: 68060 - DNA, 171 bp, Neisseria meningitidis; identical to SEQ ID NO: 39871

SEQ ID NO: 68061 - DNA, 369 bp, Neisseria meningitidis; identical to SEQ ID NO: 39932

SEQ ID NO: 68062 - DNA, 483 bp, Neisseria meningitidis
atggctatcgtgaagaattccgtggtttcgctgcattatgagatgtatgatgccaacaatcagcttttggacaaaaccgaagaaccgattgcgtatctgcacggcggttacgacggcattttccctttggtggaagaggcgttgcacggtaaggatgccggcgatacggtcgatgtggcgctttcgcccgacgatgcgttcggcgagcaggatccggagttggtccgtattgaagatgcgggcgtgttccctgttgaagtcgaagtcggcatgatgtttgaagccgacgatcctgaaaccggcgatgttgtcgtctatcgtgtaaccgatgttgccgacggtaaggcggtggtggacggcaaccatcctttggcaggcatgaaaatccgctttaaggctacggttgaaagtgtgcgcgatgcatccgatgaggaaatcgcacacggccatgtccacggcccgcacggtcatcaccaccactga

SEQ ID NO: 68063 - DNA, 1842 bp, Neisseria meningitidis
atgcggacaaattatttgtctgaaacggattcgattatgaaaaaactgatttgcctgttcgccgtatttttgatgttgtgcggacgagctttcgcgctggatgcgaacgatctgctgccgccggaaaaggcattcgtgccggagcttgccgttgccgacgacggtgtgaacgtccgtttcaggattgccgacggatactatatgtatcaggcgaaaatcgtcggcaagaccgatccggcggatttgttgggacagccttctttcagcaagggcgaagagaaggaagacgagtttttcggcaggcagacggtttaccatcacgaagcgcaggttgcctttccttatgcaaaggctgtcggcgaaccgtataaattggttttgacctatcagggctgtgccgaagtcggcgtgtgctatccgcccgtggataccgagtttgatatttccggcaacggcacttaccatccgcaaaccgacgaaccggcatccgccaaagaccgctttttgcagccttcctctcaaaacggcagcggggcgctgccgcccccgaagggggatgagggcggcgacagccgtttcaagctgtcttgggatacgctcaacgccaatcttttggcgttttttctcgccggtttgggtctgagttttaccgcctgtatgtatcccctgttgccgattgtttccagtattgtggtcggcgacaaaaaggcgggcaaggcgcgggcgtttgtgctgtccgtcgtttatgtccaaggtttggctctgacttatacgctggtcggcattgttgccggactgacgggcgcgttgctgactgtatggttgcagcaggcttgggtggtgttggcggcatcggctttaatggtcgtcttggcactgtctatgttcgggctgttcaatatccagcttcccaacgccgtgcagtcgtattttcagaatcaaagcagcaggctttcaggcggtaaaatcgtttccgtctttattatgggcatattgtccgcgctgattgtcgggccgtgcgtcgccccgccgctggcatttgctttgggctacatcggtcagacgggcgatgcggttttaggcggtttggcactttacactttggcgttgggcaccggcgttccgctgattgccatcggcacgttcggcgggcatatcctgcctaaggcaggcgattggatgaatgccgtcaaatacgctttcggctttatcctgcttgccgtcgccgtttacctcgccacgccgcacttgccctattatctcgtcgtcgcgctgtacacgctgctgatgctggttcctgcctgtatgctgctggtcaacggacgcaggcagaaacgccgtccgaaagctgtggcattcgtattgggcggcatattgctgataggcggcgcgtggttcggctggcagggcgcaaacggcaaaacgaccgcgctgcaccatttcctgaccctcaatccgccggctgaagcaggcaaatcttcggaacacggaaaaatgtttgccgatactgccgcgctgaaggcagcgatggatacggcgttgaaagaacatcccgacaaacccgtcgttttggatttttatgccgactggtgcatttcctgcaaagaaatggcggcttacacgctcaatcagccggaagtgcatcaggcagtcgatatggaacgctttttccaaatcgatgtaaccgccaacatgcccgaacatcaggcgttgttgaaagaatacggtctgttcgggccgccgggcgtgtttgtcgtccgctccgacggcagccgcagcgagccgctgctgggttttgtcaaagcagacaagtttatcgagtggtatgaacaaaaccgctga

SEQ ID NO: 68064 - DNA, 870 bp, Neisseria meningitidis
atgaaggagcggatagtgggtcaaagcggcgagttgttttgtttcggacaaatgcctgtatggaaagtggaaaacctgccggaaattttgttgtcgggctattcgtctgaggaaggggaatgggtctgcctgaatgtgttgcagggcgatgtcgaagtccgtgcaccggacggggcggcagaggtttggtcggcagaaagcggcgattgcgtgtttgcgccgcagcaggtgttttctgtcaaaccgaaaacggacgatgccgaaatccgtttgtcgctgtattgcgcggcggcagactattttcacaaaaaatacggcatgagtgccacgcattctgcggttgcggcggctcaggataccgtaccggcgggcagggcgttggatatgggctgcggacaggggcgcaacgcactgtttctcggtttgaagggatttgaagttactgcagtcgatcacaatccggccgccttggcaaacgtggcggagctggcagaggcggagggcttgaacgtccgcacgctggaatatgacttgaatgccgccgccttgcagggtgagtttgattatattgtggcaacagtggtgctgatgttcctgatgccgcagcgcgtgcccgacgtgattgccgatatgcaggcgcatacggcggcgggcgggtacaatttgattgtgtcggcaatggatacggcggatttcccttgtccgatgccgttcccttttaaatttaaagagggagagctgaaggattattatcgggattgggagctggtcgaatataaagaagaattgggcgcgatgcacgccaaagacgaaaacggcaatccgatacggtttaaatttgtaaccatgctggcgaaaaagcctgaataa

SEQ ID NO: 68065 - DNA, 291 bp, Neisseria meningitidis; identical to SEQ ID NO: 41644

SEQ ID NO: 68066 - DNA, 114 bp, Neisseria meningitidis; identical to SEQ ID NO: 39856

SEQ ID NO: 68067 - DNA, 1077 bp, Neisseria meningitidis
atgcaagaatggttccaaaacctctttgccgcaacgctcggtctgggcgatttgggtatcaccgtgggcttggtggtatccgtcatcgtcaaaatcgtgattatcctgattccgctgattctgaccgtcgcctacctgacttatttcgaacgtaaagtcatcggcttcatgcagcttcgcgtcggcccgaacgtaaccggcccgtggggcctgatccagccgtttgccgatgtgttcaaactcttgtttaaagaggtaacccgtccgaagctgtcaaacaaagccctgttctacatcggcccgattatgtcgcttgccccgtctttcgcggcgtgggcagtgattccgttcaacgaagaatgggtgctgaccaatatcaatatcggccttttgtacatcctgatgattacctcgctgtcggtttacggcgtgatcatcgcgggctgggcttccaactcaaaatattcgttcttgggcgcaatgcgtgcttccgcacaaagcatttcctacgagattgccatgagtgccgcgctggtgtgtgtcgtgatggtgtcgggcagcatgaacttctccgacatcgttgccgcgcaggcaaaaggtatcgcgggcggttccgtattctcgtggaactggctgccgctgttcccaatcttcatcgtctatctgatttccgccgttgccgaaaccaaccgcgcaccgtttgacgtggcagagggcgagtccgaaatcgttgccggacaccacgttgaatattccggcttcgcattcgcgctgttcttccttgccgaatacattttcatgattctgattgccgcgctgacatcgctgatgtttctcggcggctggttgtctccgttcccgcaaagctggggctttatcggtacgccttccgcattctggatgtttgtgaaaatggcggcagtgttgtactggtacctgtggatccgtgcaaccttcccgcgctaccgttacgaccaaatcatgcgtttgggctggaaagtgctgattccgatcggcttcgcctacatcgtgattttgggcgtgtggatgatttcaccgctgaatttgtggaaataa

SEQ ID NO: 68068 - DNA, 525 bp, Neisseria meningitidis
atggaaatgaaacaaatgcttttagccgtcggcgtggtggcggtgttggcgggctgcggcaaggatgccggcggttacgagggttattggcgcgaaaaatcggacaaaaaagagggtatgattgccgtcaaaaaagaaaaaggcaattacttccttaataaaatcaacgtgtttacaggtaaggaagaatctatgcttttgtctgaaaaagacggcgcgctttcgataaacacggggataggggaaatcccgatcaaactttccgacgacgggaaagagctgtatgtcgaacgcaggcagtatgtcaaaaccgatgcggcgatgaaggacaaaatcatcgcccaccagaaaaagtgcggacaaacagcacaggcatacctcgacgcgcgaaaggcgttgccgtcaaaccaaacgtatcagcagcgtcaggcggcgatcgagcaattgaaacggcggtttgaagccgagtttgacgaattggaaaaagaaatcaaatgcaacggcaaaccgacattgttgctttag

SEQ ID NO: 68069 - DNA, 1383 bp, Neisseria meningitidis; identical to SEQ ID NO: 45942

SEQ ID NO: 68070 - DNA, 207 bp, Neisseria meningitidis; identical to SEQ ID NO: 41992

SEQ ID NO: 68071 - DNA, 294 bp, Neisseria meningitidis; identical to SEQ ID NO: 38787

SEQ ID NO: 68072 - DNA, 582 bp, Neisseria meningitidis
atgaaaataagatggcggtacggaattgcgttcccattgatattggcggttgccttgggcggtctgtcggcatggttgggtcgtatcagcgaagtcgaaatcgaggaagtcaggctcaatcccgacgaaccgcaatacacaatggacggcttggatggcaggcggtttgacgaacagggatacttaaaagaacatttgagcgcgaaaggcgcgaaacagtttcccgaaagcagcgacattcatttcgattcaccgcatctcgtgttcttccaagaaggcaggttgttgtacgaagtcggcagcgatgaagccgtttaccataccgaaaacaaacaggttctttttaaaaacaacgttgtgctgaccaaaaccgccgacggcaaacggcaggcgggtaaagttgaagccgaaaagctgcacgtcgataccgaatctcaatatgcccaaaccgatacgcctgtcagtttccaatatggtgcatcgcacggtcaggcgggcggcatgacttacgaccacaaaacaggcatgttgaacttctcatctaaagtgaaagccacgatttatgatacaaaagatatgtaa

SEQ ID NO: 68073 - DNA, 297 bp, Neisseria meningitidis
atgaacaaaaaattaaactatatttttatgttggactgtttagggttggtgatattgtttacttgtataatagctacttttgaaagagattatggatttaaaatttttactaattccaagaggcctgaattttattattggattggaatgttttattatggaattatttcttgctggtttgattatcaattaatttcaacaaaggcgaattcgtataaaagaaaagttaaacaatataaaattttttcagtaatattttcagttttgatatttatttctactatagtaaaactttaa

SEQ ID NO: 68074 - DNA, 510 bp, Neisseria meningitidis; identical to SEQ ID NO: 39924

SEQ ID NO: 68075 - DNA, 534 bp, Neisseria meningitidis; identical to SEQ ID NO: 60035

SEQ ID NO: 68076 - DNA, 727 bp, Neisseria meningitidis
atggcatttgcctcactatttaccctgccggacgacatcaccgccgttttggacgatgttgccctgatgaccaaagccgccgcaaagaaaaccgccggcgtggtcggcgacgatttggcacccaatgccaaccgtgttacgggcgtatcggcagaacgcgagttgccgattgtttggtcgatggcgaaaggttctttttccaacaagccggttttggtgcctgcggccctgctgctttccgccttcctgccgcaactcattacgccgcttttgacggcaggcggcatttatctgtgctttgaaggcgtagaaaagctgctgcacaagtttctgcaccgacatgacgcgcatgctcgtaatggcggcaatcggcatcggcatgactgttttggtgtacggaatcgttgccgtcaccgtcaaactcgacgacttaggcatgctgctgatgcgccgcccacaaaccttttcgcgcagtttggggcaaatgctgactgcctttatgccttgctttatgcgcggtttgagcgtggtcggcacgcttgccatgtttcttatcggcggcgtactggtcgcccacaacctcggccttctgcacgatttcctgcacgcgcaacactgggacgctggctgggcggagtacttcgccaacctcgttgtcgggctgctttccggttcgattgcctgcgcccccgccttgccgctgatgaatcgtttcggcaggcattga

SEQ ID NO: 68077 - DNA, 558 bp, Neisseria meningitidis
atgaaacccaaattcaaaaccgttttaaccgcgctgcttttggcggcttccctgccgtctatggcggcaacccatgttttgatggaaaccgacatgggcaatatccgtttggttttggacgagtccaaagcacccaaaaccgttgccaatttcgtgcgctatgcccgaaaaggcttttacgacaatacgatttttcaccgcgttatcgacggtttcgttatccagggcggcggatttaccgaagacttggtacaaaaggcaaccgataaagccgttgccaacgaatccggcaacggcttgaaaaacaccgccggtatcatcgccatggcgcggacggccgatccggattccgccaccagccaattctttatcaatctggcggacaatgattcactcaactacaaaaacggacaatacggctataccgttttcggcagggtcgaaagcggcatgaacaccgtttccaaaatcgcccgcgtcaaaaccgccacgcgcggcttttatcaaaacgtacccgtacagcccgtcaaaatccgtcgcgttgttgtcgggcagtaa

SEQ ID NO: 68078 - DNA, 753 bp, Neisseria meningitidis
atggcaaaccaaagacccatctacggcttccacgccgtcaatgcccgtttgtggcaaaaccccaaatccatcgtcgaactctacatccaagaaggcaaatcagacgcacgcacgcgcgaagtgttggaaaaggcggcaaacgaaaacatccgcgtatattttgttgacaccacccgtcttgatgccatcagcaaaggcgcgcgccatcagggtgtggccggatttatcgatgcctccaaaaaccacgtccatctcgaagacgtattggaaaacttgagcgaaccgccgctgctgctgatactcgacggcatcaccgacccgcacaacctcggcgcatgcctacgtaccgccgacgcaatgggcgtacacgccgtcatctcgccgaaagacaaaagcgcggggctgaacgccaccgtcagcaaagtcgcctgcggcgcggcggaaaccgtcccctacatcaccgtaaccaatctcgcccgcaccctgcgcgaattgaaagaatacggcatttggatcatcggcaccgatatgggcggcgagtccgacctttaccattgcgatctgcccgacagcgcggcgtgggtaatgggcaacgaaggcgacggtatgcgccgcctcacgcgcgaacattgcgacatgctggtgtccatacccatgttcggcacggtcgaaagcatgaacgtctccgtgtctgccggaatggtattaagcgaaacccgccggcagcgcgtattaaaaaacgaaaaagcgtaa

SEQ ID NO: 68079 - DNA, 564 bp, Neisseria meningitidis
atgccttggaatctccccatcttcctcacatggttgagggtcttgctcattcctgtcatgacagcccttttttacctgccttttccgtggttcgcggaggaaacgattaatctcgccgccgccgttatttttgccgttgccgccttaaccgactggtttgacggatttttggcaagactgtggaaacagacttccgatttcggcgccttcctcgatcctgtcgccgacaagctgatggttgccgtatcgctacttttactggtcaaactcgaccggacctatgttttgtttgccatgatcatcatcggcagggaaattaccatttccgcattgcgcgaatggatggcgcaaatgggcaaaaggaacagcgttgccgtcgccaccgtcggtaagtttaaaaccgccgcgcaaatgctggcaattttcctgctgctgctgaatattcccgatttttacggatttaatcttgttgttatcggcaacatattgatgtttatcgcatctttgctgacggtttggtcgatgctgtattatctgaaaatggcgtggaaagaaatcgcctga

SEQ ID NO: 68080 - DNA, 402 bp, Neisseria meningitidis; identical to SEQ ID NO: 42860

SEQ ID NO: 68081 - DNA, 324 bp, Neisseria meningitidis
atgaataaaatcattaaaggcgatagggttgtagtaattgctggtaaggataaaggtaagcagggtcaagtagttcgagtgttgggtgataaagttgttgttgagggcgttaatgttgtaaaacgccatcaaaaacctaatccaatgcgtggcattgagggcggtattattactaaagaaatgcctttggatatttctaatatcgcaatcctgaatccggaaactaataaagcggaccgtgttggtattaagctgattgaaaatgaaggcaaagttaaacgcgttcgtttcttcaaatcaaatggctctatcattggggtataa

SEQ ID NO: 68082 - DNA, 363 bp, Neisseria meningitidis; identical to SEQ ID NO: 41814

SEQ ID NO: 68083 - DNA, 1437 bp, Neisseria meningitidis
ttggaaaactcattaattatcggtttggcactggcggtattgctgatgcttttggttatgcgtgcgaagcagggtaagaaaacaccgaagcgcaaatcccaaggtgtcggcaatacgcaggggcagacacccggaagcaatgattcggactgggtcgatcagattggacaatcggtttcagacggcacgcaacccgactggtcttggaacgaaagtgccgagaccgcatccgccgccgtatccgcgcaagaagtcgatccgcttacggagtatcaggtttataagcaattcggttatcagggcaaggctgccgaatctttggctgcctatctggacggcattccggatggtgaagcgaaacctgaaaaccttatccgcgagctgctcgatatcaatctcgaagtgggggatgtcgatgttttggcagacaatctgcaaaaatacggcaaactgattccttccgaacttttggcaaaatatatcgaacaggcattacagcgcgattcaaaccatttgcgtatccgcgtcttggcggaagaaggtttgggatggggtactcaggagattgaaaaacgtgcggaaggcggttctgcgacggcagcttccgcatcgcccccgccggatgccggcggtaaggcttatgaagccgaagaaatcaagcgcatcccgattgtgcggggcaaaaaagacgtgtccggaatcagtcaagaggaaatcggtgcgattgccggtttggtccgtgccgatcaaggtgcgaaaatccttaaagacaaagtcagctatgaaacggcatcgaaacaatacgaccgtgccatccaaacttccgaaaaacctgcaaacctgattatcgatgcgttgaaactcgattaccaatacgcggacatagaccgttttgccggacatttgtggaaactttaccaaacgttgggcaactacggcaggcaggttaaagagcggatgctggggtgggggtacagcctgggttaccatgaagttttcgatgatttggaaaaagggccgaacgaccggcaaatcaaagacatcggtatggggcacgggtatctgccgaaaaatatacagaaattcaaatcgcaacatcgggatttggtgcttcaagattcttcgttgatcaacaccggttcgtctccggcagacgatgcggttaaggaagtagagtcgttgctgatgtatggtcagattgaagcggcaatggatgtgttggagcaggcggtattgaaatatcccgacgagtcccagctttatattacgttgatcgatatttatgaacgtactgaagattgggataggttggggcagtttttaagggtattgagggaacgtgcggacaggcttcctgaagaggtcgttatgctgatgagccggctgctgcagcgtatgaatcaaaatattaaaaaaataaaacggtacggaaaataa

SEQ ID NO: 68084 - DNA, 1386 bp, Neisseria meningitidis
atgatggcaagagataaccgcatccaaatgtttccgcacgaatggcgcgccagtacgacgctttccggcgtgtacgcgctgcgtatgctgggtatgttcctcgtgctgcccgtattggcggtgtatgccgcctcgctgcccggcgcggaaggcaacaaaacgctggtcgggctggcaatgggcatttacgggctgacacaggctctgctgcaactgcctttgggcatcgcttccgacaagttcgggcgcaagaaaaccatttatgtcgggctgattgtgtttgcagcgggcagcttccttgccgccgccgccgatacgctgcccatgctggtcgccgcacgcgccatacagggtgcgggagcggtcagtgcggcggttaccgcgctgctggcggatttgacgcgcgacggcgtacgtacccgcgcgatggcgatgatcggtttgagtatcggtctgacgttttcggtcagcctcgtcgttgcccctgtgattgccgacgcggtgggcgtacgcggcttgtttctgctgaccggtattttgaccgttgccagtatcggcgtggtggcgtggatgactcccgacccggaggtttccaagctgcacgaagatacgcaggcgcagccttcgcgcataggcgaagttttgaaaaaccgtaggctgctgacgctcgatttcggcattttcgccctgcacgccgcgcaaatggcattgtttaccgcgctgccttttgcgatgacgcagctcggtttggaaaaaatccagcattggaaagtctatctgccctcgaccattacgggcttggtggtgatggttccgctgattatcgtcggcgagacgcgcaacaagctcaaacaggtttttatcttgggcatcgcctgcatcgcggcggcgcagctcggtttgctgtccggtatgcgctcggtaggcttgattaccgcttatttggttgtttactttatcggttttaatgtgttggaagcgagcctgccgtctatggtttccaaaatcgcgccgtccgacctgaagggtacggcgatgggcgtgtacaacacgatgcagtcgctcggactgtttgccggcggcgtggcaggcggtttgctgtttcaaaaatacggcttttccggcgtgtttgccttttgcagcatattgatgctgctgtggctggtgattgccgttttatcgcctgcgcccaagcccgtcaaaaacctcagttaccctgtcggcggcgtgtggcaggtcaatcaggaagtgttataccgcgccttgtcggagcttgagggtgtggaagacatcggtttcagtttcgacgggcagaccgtctatctcaaagtgttgcagaagggtttcgatcaggctgccgctgaaaaaatcatcacaggagtttaa

SEQ ID NO: 68085 - DNA, 564 bp, Neisseria meningitidis; identical to SEQ ID NO: 36962

SEQ ID NO: 68086 - DNA, 621 bp, Neisseria meningitidis; identical to SEQ ID NO: 37371

SEQ ID NO: 68087 - DNA, 1311 bp, Neisseria meningitidis
atgagcgtaactgttgaaactttagaaaatctggaacgcaaagtagtgttgtccctgccttggtccgaaatcaacgcagaaaccgataaaaaactgaaacaaacccaacgccgtgcaaaaatcgacggtttccgtccgggtaaagcacctttaaaaatgattgcccaaatgtacggtgcgagcgcacaaaacgacgtgatcaacgagctggtgcaacgccgcttctacgatgttgccgttgcccaagagttgaaagtggcaggcttcccccgttttgaaggcgttgaagaacaagacgataaagagtctttcaaagttgccgccatttttgaagtgttccccgaagtcgttatcggcgatttgtctgcacaagaagttgaaaaagtaaccgcttccgtcggtgatgccgaagtggaccaaaccgtagaaatcctgcgcaaacaacgcacccgcttcaaccatgtcgaacgcgaagcccgaaacggcgaccgcgtcatcattgactttgaaggcaaaatcgacggcgaaccttttgccggcggcgcatccaaaaactacgccttcgtattgggcgcaagtcaaatgctgcctgaatttgaagccggcgtagtcggcatgaaggctggcgaaagtaaagacgttaccgtcaatttccctgaagactaccacggtaaagacgttgccggtaaaactgccgtgttcaccattacgctgaacaacgtttccgaagcgactctgcctgaagtcgatgcagattttgcaaaagctttgggtattgcggatggcgacgttgccaaaatgcgcgaagaagtgcagaaaaacgtaagccgcgaagtggaacgccgcgtaaacgaacaaaccaaagaatccgtaatgaacgcgctgctcaaagccgtagagctgaaagcacctgttgctttggtcaatgaagaagccgcacgcttggcaaacgaaatgaaacaaaattttgttaaccaaggtatggctgatgctgccaacttggatctgcctttggatatgttcaaagaacaagccgaacgccgcgtgtctttgggtctgattttggccaaactggttgatgaaaacaaactggaaccgactgaggagcaaatcaaagccgttgtcgccaacttcgcagaaagctacgaagatcctcaagaagtaatcgactggtactacgcagagccttcccgcctgcaagccccgacttctttggcgatagaaagcaacgtcgttgatttcgttttgggtaaagccaaagtaaacgaaaaagctttgtcttttgacgaagtgatgggtgcgcaagcctga

SEQ ID NO: 68088 - DNA, 192 bp, Neisseria meningitidis
ttgccgaaattcggggaatgccctctccccaaccctcccccacgggggagggggcaggttgcagcggattttgcggttgcaggcggtttgagaaagaatgcccgaaatatcaacagtgggaatttttcaggcagcctttatcgcaaggcagatgtaacaaacgccgcgagcgttttttcagacgacctttga

SEQ ID NO: 68089 - DNA, 1149 bp, Neisseria meningitidis
atgccgacaatgggggcggagatgaatacacggaatatgcgctatattcttttgacaggactgttgccgatggcatccgcttttggagagaccgcgctgcaatgcgccgctttgacggacaatgttacgcgtttggcgtgttacgacaggatttttgcggcacagcttccgtcttcggcagggcaggaagggcaggagtcgaaagccgtactcaatctgacggaaaccgtccgcagcagcctggataagggcgaggcggtcattgttgttgaaaaaggcggggatgcgcttcctgccgacagtgcgggcgaaaccgccgacatctatacgcctttgagcctgatgtacgacttggacaaaaacgatttgcgcgggctgttgggcgtacgcgaacacaatccgatgtaccttatgccgctctggtacaacaattcgcccaactatgccccgggttcgccgacgcgcggtacgactgtacaggaaaaattcggacagcagaaacgtgcggaaaccaaattgcaggtttcgttcaaaagcaaaattgccgaagatttgtttaaaacccgcgcggatctgtggttcggctacacccaaagatccgattggcagatttacaaccaaggcaggaaatccgcgccgttccgcaatacggattacaaacctgaaattttcctgacccagcctgtgaaggcggatttgccgttcggcggcaggctgcgtatgctcggtgcaggttttgtccaccagtccaacggacagagccgtcccgaatcgcgttcgtggaacaggatttacgccatggcaggcatggaatggggcaaattgacggtgattccgcgcgtgtgggtgcgtgcgttcgatcagagcggcgataaaaacgacaatcccgatattgccgactatatggggtatggcgacgtgaagctgcagtaccgcctgaacgacaggcagaatgtgtattccgtattgcgctacaaccccaaaacgggctacggcgcgattgaagccgcctacacgtttccgattaagggcaaactcaaaggcgtggtacgcggattccacggttacggcgagagcctgatcgactacaaccacaagcagaacggtatcggtatcgggttgatgttcaacgacttggacggcatctga

SEQ ID NO: 68090 - DNA, 285 bp, Neisseria meningitidis; identical to SEQ ID NO: 39906

SEQ ID NO: 68091 - DNA, 678 bp, Neisseria meningitidis
atgaaactaaaaaataagtatcaaaagttcagcaaaatttcagagcaaaagtttagagaaataatccgctgtttcgctcttgatttgaccgcttccgatactgctaaaatgaccggcattagtgtacgcagtatcaatcctattttcctgaaaatcagacacaggattgctgctctgtgcgaacaaagctcaccactgtccggtgtggtcgaattagatgaatcttactttggtgcgcgacgtatcaggggtaagcgcggtcgcggagcgtcaggtaaaaccatcgtatttggcatactgaaacgcaatggcgtggtctatacggaaatcgttcccgacgcttcgaaagcctcactaatcaaggtcatacgtggtcacatatctgctgacagtgaaatcaatactgacggctggaaagcatatgacggtcttgtcgatatgggctatgagaagcattaccgtgtccatcatggttccaatgagtttgctcgaggaaagcaacatatcaatggtattgaatctttttggagttatgctaaggggcgtttggctaaattttatggtatttccaaagagatgttttatctgcatctcaaagaaacggagtttaggtttaaccaccggcatgaagatttaggtaaaatattaatgaagatgcttcgaaataacccaatttaa

SEQ ID NO: 68092 - DNA, 357 bp, Neisseria meningitidis; identical to SEQ ID NO: 36545

SEQ ID NO: 68093 - DNA, 369 bp, Neisseria meningitidis; identical to SEQ ID NO: 37026

SEQ ID NO: 68094 - DNA, 2187 bp, Neisseria meningitidis
ttgccccgatgcctgaaacagactgtccgccacgtcatgccgtctgaaaccggcgcagatgccgccaagccttcagacggcattgcctgcccgctccgaccgaacaacaaccatctttgggagaaccttatgcccgaacaaaaccgcatcctctgccgcgaactaagcctgctggcattcaaccgccgcgtgttggcacaggcggaagacaaaaacgtcccccttttggaacgcctgcgcttcctgtgcatcgtgtcgtccaatcttgacgagtttttcgaagtccgcatggcgtggctcaaacgtgaaaacaagctgcacccccggcgcaggctggacaacggcaaaatgccgtctgaaaccatcgccgacgttaccgaagcggcgcgctccctgatacggcaccagtacgacctgttcaacaacgtccttcagcccgagttggcgcgggaaggcatccatttttaccgccgccgcaattggacagacacacagaaaaaatggattgaagactattttgaccgtgagttgttgccgattctgacccccattggccttgacccgtcccaccccttcccgcgaccgctgaacaaatcgctcaacttcgccgtcgaactcgacggcacggacgcgttcggcaggccttcggggatggcgattgtgcaggcaccgcgcatcctgccgcgcgttgttcccctgccgtccgaactgtgtggcggcggacacggcttcgtcttcctgtcgtccatcctccacgcccacgtcggcaaactcttcccgggcatgaacgtcaaaggctgccaccagttccgcctcacgcgcgacagcgacttgaccgttgacgaagaagacgtacaaaacctccgcgccgccattcaaaacgagttgcacgaccgcgaatacggcgacggcgtgcggctcgaagtcgccgacacctgtcccgcctacatccgcgactttctgctcgcgcaattcaaactgaccgccgccgaactctatcaggtcaaaggcccggtcaacctcgtgcgcctcaacgccgtccccgatttggttgaccgtcctgatttaaaatttccgccccatacacaaggcaggttgaaagccttgggtaaaaacggctcgatattcaaactgatacgccgtgcacccatcctgctgcaccacccctaccaatccttcaatcccgttgtcgaaatgatgcgcgaagccgccgccgaccccgccgtgcttgccgtcaaaatgacgatttaccgcaccggcacgcgttccgaactcgtccgcgccctgatgaaggcggcactcgccggcaaacaagtaaccgtcgtcgtcgaactgatggcgcgttttgacgaagccaacaacgtcaactgggcgaagcagctcgaagaggcgggcgcgcacgtcgtgtacggcgtgttcggctacaaagtccacgccaagatggcactggtcatccgccgcgaagacggcgtactcaagcgttacgcccacctcggcacgggtaactaccaccaaggcacatcgcgcatctacaccgacttcggcatcattaccgccgacgaacaaatcaccgccgatgtgaacacattgtttatggaaatcacaggcttgggcaaacccgggcggctgaacaaactctaccaaagcccgtttaccctgcacaaaatggttatcgaccgcatcgcacgcgaaaccgaacacgcaaaagccggcaaaccggcgcggattaccgccaagatgaattcgctcatcgaaccgaccgtcatcgaagccctgtatcgggcaagcgcggcaggcgtacaaatcgatttgattgtgcgcggtatgtgcaccttgcgcccgggtgtaaaaggcttgtccgaaaacatccgcgtccgctccatcatcggcaggcagctcgaacacgcgcgcgtgtattgcttccacaacaacggcgcggacgatacctttatctccagcgcggattggatggggcgcaacttcttccgccgcatcgaaaccgccgcgccgattaccgcgcccgaactcaaaaaacgcgtcatccgcgaaggtttggaaatggcattggcagacaatacgcacgcgtggctgatgcagcccgacggcggctatatccgcgccgcgcccgccgagggcgaatccgaagccgacctgcaaaacgatttgtggacactgctcggaggctga

SEQ ID NO: 68095 - DNA, 828 bp, Neisseria meningitidis
atggatggagaaggtatgtcggttgggcattatgaaaattttcccgtcggttcgctgattttgccgcgcaggttgaggaagccggttcatgcggtgtatgcgtttgcacggacggcggacgatatggcggacgagggcagtatgccgtctgaagccaggttggcggggttggatgctttgcggcgcgagttggacgtgttggcatcgggcggccggtcggcgcatcctttgattgcacgattggatgccgaggcggttgtgccgttcggtttggatttgcagccgttttatgatctgctctcggcgttttcgcaggacgtggtcaaaacgcggtacgcgcatttcggcgagctggccgattattgccggcgttccgccaaccctgtcggacgcattatgctggctttgtacgggaaaacggatgcggtgtgcgtggcgcaaagcgacggcatctgtacggctttgcaactggtgaatttttggcaggatgtggctgtggattggcaaaaaggcagggtttatattccgcaggacgatttgttgaaattcggtgtttctgaggaacagatcgcggcaggacgggcggatgcggcgtttcagcggctgatggcgtatgagtgtcggcgtgcgttccgtatgctgaaggcgggttcgcctttggcaagggaactgaatgggcgtatcggtttggaactccgtatgattgtgttgggggcgcagttgattttgcagaaactggacgcgtgccgatacgatgtgtttgcacaacgccccgttttggataagaaggattggttgattatgctgaaaaaggcgttgtggaaatga

SEQ ID NO: 68096 - DNA, 375 bp, Neisseria meningitidis; identical to SEQ ID NO: 37139

SEQ ID NO: 68097 - DNA, 879 bp, Neisseria meningitidis; identical to SEQ ID NO: 46918

SEQ ID NO: 68098 - DNA, 561 bp, Neisseria meningitidis; identical to SEQ ID NO: 45918

SEQ ID NO: 68099 - DNA, 1083 bp, Neisseria meningitidis
atgccgtctgaagccgcttcagacggcattttgccgctttaccctacccgcactatttttcagaaaccgatcatgcttccattctttccagaaccctccctttcctatacgcaacaaaaccgtaccgccgttttgctgttgaacctcggcacgcccgacgcgccgaccgcgcaggcggtacgaccttatctgaagtcctttctgaccgaccggcgcgtcgtcgaactgcccaaatggctgtggtatcccattctgcatggtctggtactgacgttgcgccccaaaaaaagcgcgcacgcctatgaaaaaatctggtttaaggaaggttcgcccctagaagtttacacagcacgccaagctgccgcgcttgccgaacgtatgcccgacctcatcgtccgccacgccatgacctacggcaatccttcggtggcagacgtattgtcggaactgaaggcgcaaggcgcgggcagactgctggtcatcccgatgtacccgcaatatgccgcttccagcagcggagcggcagtagataaggtgtgcgaacaattactgctgcaacggaaccaaatgagcgtccgcaccgtttcgcgcttttatgacgataccggctacattgatgcgatgaaaaaccacatcctccgatattgggcggaacacggacgtgggaaaaaactgatgttgagttttcacggcgtaccgcagaagcactacgacctcggcgacccctatcccgacgagtgccgccacaccgccaaactgcttgccgaagcactggaactgaccgaagaccaatatgtcgtatcgttccaaagccaattcggcagggcaaaatgggttacaccgagcacgcaggatttgttcggcaaactgcccaaacagggggtaaccgagctggacgtattctgcccgggctttttggcagactgtttggaaaccatggaagaaatcgccctgatggggcgggaacagttttacgaagcaggcggcaaaagctaccgctacatcccctgcctcaacgacaaccccgactggatagacgcactcgtcgcacttgccgaagaaaaccttggcggctggcgttga

SEQ ID NO: 68100 - DNA, 1155 bp, Neisseria meningitidis
ttgttggaacaggatatgagtcaaaatgcctcggtgggcattgtaacgccccaaaaaattccgtttgaggtgccgctggttttggaaaacggtaaaactttgccgcgtttcgatctgatgattgaaacctacggcgagctgaatgctgaaaaaaacaatgcggttttaatctgccacgcgctgtcgggcaaccatcatgttgcgggcaggcattcggcggaggataaatatacgggctggtgggacaatatggtcggacccggcaaaccgattgatacggaacgttttttcgtggtcggtttgaacaatctgggcggctgtgacggcagcagcggacctttgtcgatcaatcctgaaacgggtagggaatacggcgcggattttccggtggttacggtgaaggactgggtaaaatcacaagccgcgcttgccgactatctcggcatcgggcaatgggcggcggttgtcggcggcagtttgggcggtatgcaggctttgcagtgggcgatttcctatcccgaacgcgtgcgccatgccttagtgattgcgtctgcgccgaaactgtccacgcaaaatatcgcgttcaacgatgtggcgcgtcaggcgattttgaccgaccccgatttcaacgaaggacattaccgcagccataataccgttcctgcacggggcttacggattgcccgcatgatggggcacattacctatcttgccgaagacggtttgggcaaaaaattcggacgcgatttgcgttccaacggctatcaatacggttatggcgttgaatttgaagtagaatcctatctgcgctatcagggcgacaaattcgtcgggcggtttgatgccaacacctatttgctgatgaccaaagctttggactatttcgatccggcggcggatttcggcaacagcctgacccgcgccgtgcaggatgtgcaggcaaaattctttgtcgccagcttcagcaccgattggcgtttcgcgcccgaacgttcgcacgaactggtcaaggccctgattgccgcccaaaaatccgtgcagtatatcgaagtcaaatccgcacacgggcacgatgcctttttaatggaagacgaagcctatatgcgtgcggtcgccgcctatatgaacaacgtttataaggaatgtcagcaatga

SEQ ID NO: 68101 - DNA, 1470 bp, Neisseria meningitidis
ttgaaagcggttattccgcataccggaggatacgaaatgaacgaatattcccaattaatcaagcatcccgatatttccctttccccgatttcagacggcatcggggtcggcaatccggcaacgggcgaaattttggcgtatgtccgcaatacgggttcggacaaactgaaaaacctgattcaaaaggcggcggcagcgcaaaaattatgggcggcgaaaactgctttggaacgcgccgacatattgtggcgttggtattttttagttaaagaaaacaaagaagcactggcgcgcctgatgacgatggagcagggcaaaagcctgaccgagtcgcgcggcgaaatcgattatgcggcttcgtttgtgcgctggtttgccgaagaagcgcggcggattgacggcgatgtgttaacgagtgtaaaagcgtcgcaaaaactgattgtgttgaaacagcctgtcggcgttaccgccgcgattacgccgtggaacttcccatctgcaatgattgcgcgcaaggctgcgcctgctttggcggtgggctgcgcgatgatcgtcaaacccgcatcgctcacgcctttgagtgcgtatgcgttggtcgtgctggcttatgaagcgggcgtaccacaggatttgttgcccgtcgtcagcggcagtgcttcggaaatcggccatgaatttgctacgaacccgattatccgcaaaatcagcttcaccggctcgaccgaagtcggcgcaaaaatttttgccgacagcgcggcggacattaaaaaactcagtttggagctgggcggcaacgcgccgtttatcgtgtttgacgatgccgatttggacaaagccgtcgaaggcgcgctcgccagcaagttccgtaacagcggtcagacctgcgtctgcaccaaccgcgtttacgctcaatccgccatttacgacgaattttgccgcaaattgagtgaaaaagcagccgcgctcaaattgggcaacggcttggaggatggtgtgaaccaagggccgctgattgaggaaaaagcggtggagaaagtcgagcagcacatcgccgacgcgcttgctaaaggtgcaagctgcctgaccggcggcaaacgcagcgcgttgggcggaacgttttttgagccgaccgtcttaagcggcgtaacggcgcaaatggcggtagctcgcgaggaaaccttcgggcctttgtgtccggtattccgttttgaaaccgaagccgaggtcatcgaggctgcgaacaatacggaatacggtttggcagcttaccttttcaccgccgacaccgcccgccaatggcgcgtcggcgaagccttggaatacggcatggttggcatcaatacgggcttaatcagtaatgaagcggcaccgttcggcggcgtgaaacgcagcggtttgggacgtgaaggcagcaaatacggtgcggacgaatatctggaattgaaatatctgtgtatggatgtcgggtga

SEQ ID NO: 68102 - DNA, 1545 bp, Neisseria meningitidis
atgaatatggtttccaaactggacaaatactggcagcaccccgccctctactggcctttgctcatcctttttgccgccgccaccccctttaccttcgcaccctactaccacttttggctgatgcccttgattttcggtgccttcgtccgcctcatcgaactgcgtccgcgttttgctgtctcttccgcctacctgttcggcctgaccgcatacacgacacagttctactggatacacaccgccctgcacgacgtttccggcctgcccgacctctatgccgtaccgctgaccttcctactccccgcctaccttgccctttatccggcactgtgtttctggctgtggaaaaaatttaccctgcctcggggcataaaaatcggtttggtactgcccatcctgtggacgctgaccgagtttgcccgcgaacgtttcctgaccggattcggctggggcgcaatcggctactcccaaatcaccccggacagcccgctcgccggctttgccccattgggcggcatccacatggttacactggcaaccgcctttctcggtgtctggctggttttggcgagtgataacaccgcacgttcgggcaaacgcctgcttccaattatcctgattgccgccctgcttgccgcaggctacaccgcccgacaaaccgacttcacccgccccgacggcagccgcagcaccgtcgccctgcttcaaggcaacatcgaccaaaccctcaaatggcgtgaagaccaagtcatcccgaccatacagaaatattacgaacaggtcggcaaaaccactgccgacatcgtcatcctgcccgaaaccgccatccccgttatgcgccaaaacctgccggaaaacatactggcaaaatttgccgaacaggcgcaaaacaacggcagcgcgctcgccgtcggcatcagccaatacacttcggacggcaacggttacgaaaacgccgtcatcaacctgaccggttatcaggaaaacaatcaggacggcatcccctactacgccaaaaaccacctcgtccccttcggcgaatacaaaccgctgcccttcctgaccacgccgctttacaaaatgatgaatatgcccctttccgacttccgcaaaggcggcggtaagcaatccgccctgctgatgaaaaaccaaaaaatcgccttcaacatctgttacgaagacggattcggcgacgaactgattgccgccgccaaagatgccaccctgcttgccaatgccagcaatatggcgtggtacggaaaatccaacgccatgtaccagcacctccaacaatcgcaggcgcgggctatggaactcggacgctatatggtccgtgccaccaacaccggcgcaaccgccatcatctcccccaaaggcaacatcatcgcccaagcccaacccgatacggaaaccgtattggaaggacacatcaaaggctatgtcggcgaaacgccctatatgaaaaccggcagttcatggtggttgatgggcatattgaccctagccgcactgattcttttcatcttccgaaacaaagaacactga

SEQ ID NO: 68103 - DNA, 354 bp, Neisseria meningitidis; identical to SEQ ID NO: 39889

SEQ ID NO: 68104 - DNA, 396 bp, Neisseria meningitidis
atgatgcggcgacggggtaaaaaaatgttgtttgaagaaaatccgatagacggacattttacagagtatggccaccggtcgggtgaaatccgattggcgggtcaaagtttccataaacccgtgcttgtacataaggattcggtctgcctgtcgcaatgccgaaccttgtccgatctgactccggaaaacctgttgtccgacatcaaacctgttgactatccggaaatattgattatcgggacgggcgcggctcaggagtttatccatcccaaaatcatggcggatttttcccgaatcggaatcagcgtggaatgcatgaataccgattcggcattcaggacattggttttcctgcactcggaagggcgcagggcttgggcttggcttcagccgtaa

SEQ ID NO: 68105 - DNA, 291 bp, Neisseria meningitidis; identical to SEQ ID NO: 54697

SEQ ID NO: 68106 - DNA, 426 bp, Neisseria meningitidis; identical to SEQ ID NO: 39901

SEQ ID NO: 68107 - DNA, 1125 bp, Neisseria meningitidis
gtgtgcggattatgccataaaacggtgtccgacccaatcgcgggcgcgtccggagattggaaatcctgcttaaaaaatgtacaatggcgtacttttttgaaacgcggatccattatgcacatcggcggctattttatcgacaaccccatcgcacttgcgccgatggcgggcattaccgacaaaccgttccgccgactttgccgagattttggcgcaggttgggcggtgtgcgaaatgctgaccagcgacccgacgctcagaaatactagaaaaaccttgcaccgcagcgattttgccgatgaaggcggcattgttgccgtgcagattgccggaagcgatccgcagcagatggcggatgccgcgcgttacaacgtcagccttggggcgcagcttatcgacatcaacatgggctgtcccgctaaaaaagtctgcaatgtccaagccggtagcgcgctgatgcagaacgagccgctggttgccgccattttggaagccgtcgtccgtgcggcaggcgtacccgttaccctcaaaacccgtttgggttggcacgacgaccatcaaaacctgcccgtcatcgccaaaatcgccgaagattgcggcatcgccgcccttgccgtccacggacgcacgcgtacgcaaatgtacaaaggcgaagcgcgttacgaactcatcgccgaaaccaaatgccgtctgaacatcccggtctgggtcaacggcgacattacttcgccgcaaaaagcccaagccgtcctcaaacaaaccgccgccgacggcattatgatagggcgcggcgcgcaaggcaggccgtggttcttccgcgatttgaaacattatgccgaacacggtgttttgccgcctgccttgagtttggcagaatgcgccgccgctattttgaaccacatccgcgccatacacgcgttttacggcgacaccgccggtgtgcgcatcgcacgcaaacacataggctggtacatcgacgaaatgcccgacggcgaacagacacgtcgtgaaatcaaccgcttggacagtgcggcggcgcaatacgacatgcttgcaggttatcttgaaagacttgccgaaaaaaccgacagttgggcgtgcgcctaccgcccaaatgccttctga

SEQ ID NO: 68108 - DNA, 846 bp, Neisseria meningitidis
atgaacaaattttcccaatccggaaaaggtctgtccggttttttcttcggtttgatactggcgacggtcattattgccggtattttgttttatctgaaccagagcggtcaaaatgcgttcaaaatcccggttccgtcgaagcagcctgcagaaacggaaatcctgaaaccgaaaaaccagcctaaggaagacatccaacctgaaccggccgatcaaaacgccttgtacgaaccggatgctgcgacagaggcagagcagtcggatgcggaaaaagctgccgataaagccgacgaggttgaagaaaaggcgggcgagccggaacgggaagagccggacggacaggcagtgcgtaagaaagtgctgacggaagagcgtgaacaaaccgtcggggaaaaagcgcagaagaaagatgccgaaacggttaaaaaacaagcggtaaaaccgtctaaagaaacagagaaaaaagcttcaaaagaagagaaaaaggcggaaaaggaaaaagttgcacccaaaccgaccccggaacaaatcctcaacagcggcagcatcgaaaaagcgcgcagtgccgccgccaaagaagtgcagaaaatgaaaacgtccgacaaggcggaagcaacgcattatctgcaaatgggcgcgtatgccgaccgccggagcgcggaagggcagcgtgccaaactggcaatcttgggcatatcttccaaggtggtcggttatcaggcgggacataaaacgctttaccgggtgcaaagcggcaatatgtctgccgatgcggtgaaaaaaatgcaggacgagttgaaaaaacatgaagtcgccagcctgatccgttctatcgaaagcaaataa

SEQ ID NO: 68109 - DNA, 1443 bp, Neisseria meningitidis
atgaaacaattggccatgtacatcaacggacgctttgaaaacgacttcaacggcgaatggcgcgacgtattgaacccttccaccgaagaaaccatcgcccgcgaacccaaaggcggaaaagcagacgttgaccgagctgtggcggcggcacgcgcggcgcaaccggcttgggaacgcctgcctgcggtcgaacgcggcgcgtatttgcgcaaaatcgcccaaggcatacgcggacgcgccgacgagctgaccgacaccatcgttgccgaaggcggcaaaaccaaagacttggcgcgcgtagaagtgatgttcaccgccgactatctcgattaccaagccgaatgggcgcgccgttacgaaggcgaaatcatccaaagcgaccgcccgcgtgaaaatattttattgttcaaacgtccgctgggcgtaattgccggcattttgccgtggaacttccctttcttcctgattgcccgcaaaatgggtcccgccttagtaacgggcaacaccatcgttgtcaaacccagcagcgtaaccccgatcaactgccacatcttcgccgaaatcgtcgatgcggtcggattgcccgcaggcgtgttcaacgtggtgaacggtccgggtgcggaaatcggcaatgccttgtctgcccatccgcaagtcgatatggtcagcctgaccggctccgtcgaagcaggccgccaagtgatggaagccgcttccgccaacatcaccaaagtttcgctggaactcggcggcaaagcccccgccatcgttttgaaagacgcggatttggatttggcggtgaaatccatcttggcttcgcgcgtcggcaacaccggtcaaatctgcaactgcgccgagcgcgtctatgtccacagcagcctgaaagacgcgttcattgaaaaaatgaccgccgccatgaaaggcgtgcgctacggcaaccctgccgaagccgaagcaggcgcgctggaaatgggtccgctgattgaagagcgcgccgtcaaagccgttgccgaaaaagtggaacgggcagtcaaacaaggtgcgaaactggtctgcggcggcaaacgcgccgaagggcgcggctatttcttcgagccgaccctgctgaccgacaccgacaacagtatggacattatgaaagaagaaaccttcggccccgtgctgcccgtttccgctttcgacacgctcgaccaagtcatcgcactggctaacgattgcgagtttggtctgaccagttctgtttatacgactaatttaaacgaagccttctacgttacccgccgcctgcaattcggcgaaacctacatcaaccgcgaaaacttcgaagccatgcagggtttccacgccggttggaaaaaatccggtatcggcggcgcggacggcaaacacggtttggaagaatatctgcaaacccaagtcgtttatttggaaaccgacatttaa

SEQ ID NO: 68110 - DNA, 954 bp, Neisseria meningitidis
atgaatcacaaaaagatagtcgtcttggatgcggatactttacccggtcgggcttttcacttcgattttccgcacgagctcgcagtttacggtacgacaggtgcggatgaaacggcagaacgggtgcacgacgcacatgttgtcattaccaacaaagtgatgatttccgccgacattattgcggctaatccgcagttggagctgattgccgtcagtgcgaccggcgtgaacaatgtcgatattggggcggcggaggcggcgggcgttgcggtatgcaatgtccgcgcctacggaaacgaatcggttgcggaacacgcctttatgctgatgattgcgttgatgcggaatttgcccgcctatcagcgtgatgttgcggcaggattatgggagaagtcgccgtttttctgtcattacggcgcgccaatcagggatttgaacggcaaaacgctggcggttttcggacgcggcaatataggacggacgcttgcccgatatgcacaggcgttcggtatgagggtggtgtttgccgaacacaaacacgcgcccgacgtgcgcgaaggctatgtttcctttgaagatgcggtacggactgccgacgtgttgtcgctgcactgtccgctgaacgcccaaactgaaaatatgataggcgaaaacgaattgcggcagatgaagccctgtgcggttttgattaattgcgggcgcggcgggctggtggatgaaaacgcgctgcttgccgcactcaaatacgggcagatcggcggggcgggtgtcgatgttttgacggaggagccgccaaggggcggcaatcccctgctgaatgcacgacttcccaatctgattgttacgccgcataccgcgtgggcgagccgcgaggctttggacaggctgttcgatatattgttggcgaacattcacgcctttgtgaaaggagaggcgcaaaaccgcgtggtttga

SEQ ID NO: 68111 - DNA, 768 bp, Neisseria meningitidis; identical to SEQ ID NO: 60018

SEQ ID NO: 68112 - DNA, 855 bp, Neisseria meningitidis
atgtcggcacaactgatcaatggtaaagaagtttcgcaaaaacgcctgcaggcggttgccgaagcggtggcgcaacgccaacaggacaatctgcacacgccttgcctggccgtggttttggtcggaggcgaccctgccagcgcggtttatgtccgcaacaagaaaactgcctgccaaaaatgcggcatcaaatcactgtcttacgagctgcccgaatcaacatcgcaggaagaactgctggcactggtcgaccgcctgaatgccgattccgaagtggacggtattctggttcagctaccgctgccgaagcacctcgacagccaggcggttttggaacgtatttcgccggataaggacgtggacggcttccatccttacaatgtcggcaggctggcggtcaaaatgccgctgatgcgcccgtgtacgcccaagggcgtgatgacgcttttggaagcttacggcattgatccgaaggggaaaaaagcggtcgtggtcggcgcgtcgaatatcgtcggccgcccgcaggctttggaactgctgctggcgcgcgcaacggtaacggtctgccacagcgcaaccgaaaatctgacagacgaggttgccggagccgatattttggtggtcggcgtaggcattccgaactttgtcaaaggcgaatggatcaaacctggcgcggtcgttattgatgtgggcatcaaccgtttggacgatggcagcctgtgcggcgacgtggaatttgaaacggcaaaagaacgggcggcgatgattacgcccgttcccggcggcgtgggtccgatgacgattgccacattgatggaaaacaccctgcacgcggcttcactgcacgatgcttga

SEQ ID NO: 68113 - DNA, 393 bp, Neisseria meningitidis; identical to SEQ ID NO: 37839

SEQ ID NO: 68114 - DNA, 1296 bp, Neisseria meningitidis
gtgattgccatgatttacatcgtactgttcctcgccgccgtcctcgccgttgtcgcctacaatatgtatcaggaaaaccaataccgcaaaaaagtgcgcgaccagttcgggcactccgacaaagatgccctgctcaacagcaaaaccagccatgtccgcgacggcaaaccgtccggcgggtcagtcatgatgccgaaaccccaaccggcggtcaaaaaaacggcaaaactccaagaccctgctatgcgcaacctgcaagaacaggatgccgtctacatcgccaagcagaaacaggcaaaagcctccccgttcaaaaccgaaatcgaaaccgccttggaagaaagcggcattatcggcaactccgcccacaccgtttccgaaccccaaaccggacattccgcaccgaaacctgccgacgcgccggcaaaacccgttcccgttccgcaaacgccggcaaaaccgctgattacgctcaaagagctgtcgaaggtcgagctgccctggtttgacgtgcgcttcgacttcatctcctatatcgcgctgaccgaagccaaagaactgcacgcactgccacgcctttccaaccgctgccgctaccagattgtcggctgcaccatggacgaccatttccagattgccgaacccatcccgggcatccgctatcaggcatttatcgtgggtattcaggcagtcagccgcaacggacttgcctcgcaggaagaactctccgcattcaaccgccaggtggacgcattcgcacaaagcatgggcggtcagacgctgcacaccgaccttgccgcctttatcgaagtggcttccgcactggacgcattctgcgcgcgcgtcgaccagaccatcgccatccatttggtttccccgaccagcatcagcggcgtagaactgcgttccgccgtaacgggcgtgggtttcgttttggaagacgacggcgcgttccactataccgacacgtcgggctcgaccatgttctccatctgctcgctcaacaacgagccgtttaccaatgcccttttggacaaccagtcctacaaaggcttcagtatgctgctcgacatcccgcactctccggcaggcgaaaaaaccttcgacgatttgtttatggatttggcggtacgcctgtccggccagttgaacctgaatctggtcaacgacaaaatggaagaagtttcgacccaatggctcaaagacgtgcgcacttatgtattggctcgtcagtccgagatgctcaaagtcggtatcgaaccgggcggcaaaaccgcattgcgcctgttctcctaa

SEQ ID NO: 68115 - DNA, 219 bp, Neisseria meningitidis
atggtgaaagaagatactatccaaatgcaaggtgaaattcttgaaactttacctaatgcaacatttaaagtaaaacttgagaatgaccatattgtattgggtcatatttctgggaagatgcggatgcattacattcgtatttctccgggagataaggtcacagtagagctgacaccttatgatttaactagggctcgaatcgttttcagagcaagataa

SEQ ID NO: 68116 - DNA, 201 bp, Neisseria meningitidis; identical to SEQ ID NO: 36765

SEQ ID NO: 68117 - DNA, 369 bp, Neisseria meningitidis
atgcgtcattacgagatcgtgtttatcgttcatcctgatcaaagcgagcaagtgcctgctatggttgaacgttacaaaaccatgattgccgaagcaaacggtaagattcaccgtttggaagattggggtcgccgccaactggcttacccgattaacaaaatccataaagcccattacgttttgatgaacatcgaaaccactcccgaagtggttgaagagctggaaaccgcattccgcttcaatgatgccgtattgcgccatctaaccatcaaaaccaaacacgccgttaccgaagcatcccctatgttgggtggtgaaaaggctaagaacctgttgagcggtgcgtctgaagaagcggtcgcccaataa

SEQ ID NO: 68118 - DNA, 213 bp, Neisseria meningitidis; identical to SEQ ID NO: 41375

SEQ ID NO: 68119 - DNA, 453 bp, Neisseria meningitidis; identical to SEQ ID NO: 49903

SEQ ID NO: 68120 - DNA, 435 bp, Neisseria meningitidis
atggaaaaattcagcaacattgcgcaactgaaagacagcggtctgaaggttaccggcccgcgtttgaagattttggatttgttcgagacgcatgcggaagagcatttgagtgcggaagatgtgtaccgcattttgttggaagagggtgtggaaatcggtgtggcgacgatttaccgtgtgctgacccagtttgagcaggcgggtattctgcaacgccatcattttgaaacgggcaaggcggtttatgagttggacaaaggcgaccaccatgaccacatcgtctgcgtgaagtgcggcgaggtaacggaattccacaatcccgaaatcgaagccctgcaagacaaaatcgctgaggaaaacggctaccgcatcgtcgatcacgcgctttatatgtacggcgtgtgcagcgactgtcaggccaagggcaaacgttaa

SEQ ID NO: 68121 - DNA, 429 bp, Neisseria meningitidis
atggccattctgaaacttgacgaacacctctatatttctccgcaactgaccaaagccgatgcggaacaaatcgcgcaactgggcatcaaaaccgtcatctgcaaccgccccgaccgcgaagaagaatcgcaacccgacttcgcccaaatcaaacagtggctggaacaagcaggcgttactggattccatcaccaacccgttaccgcacgcgacatccaaaaacacgatgtcgaaaccttccgccaactcatcggacaagccgaatctcccgtccttgcctattgccggaccggtacgcgctgctccctcctgtggggcttccgccgggcggcagaaggtatgccggttgacgaaatcatccgccgcgcccaagcggcaggcgtaaatttggaaaacttcagagagcggctggacaacgcccgcgtctga

SEQ ID NO: 68122 - DNA, 315 bp, Neisseria meningitidis; identical to SEQ ID NO: 50782

SEQ ID NO: 68123 - DNA, 318 bp, Neisseria meningitidis; identical to SEQ ID NO: 41968

SEQ ID NO: 68124 - DNA, 744 bp, Neisseria meningitidis
atgcctgatgccgtcaaaaaagtttacctgatacacggttggggggcgaaccgccacgtgttcgacgatttgatgccgcgcctgcctgcaacgtggccggtgtccgccgtcgatttgcccggacacggcgacgcgcccttcgcgcaacccttcgatattgaggcagccgccgacgctgttgccgcacaaatcgatacgcccgccgacattctcggctggtcgctcggcggattggtcgcgctgtatctggcggcgcgccatcccgacaaagtccgttcgctctgcctgacggcgagtttcgcacggctgacggctgacgaagactatcccgaagggcttgccgcgcctgcattgggcaaaatggtcggcgcgttccgaacggattatgccaaacatatcaaacagtttctacaactccagcttttgcacacgcctgatgcggacggaatcataggcagaatcctgcccgatttggcgcgctgcggcacgccctccgccttacaggaagctttggacgcggcggaaagggcggatgcgcggcatttgttggacaagatagatgttccggtactgctggtgttcggcggcaaagacgcgattacgccgccgcgcatgggcgagtatctgcaccgccgtttgaagggcagcaggctggttgtgatggaaaaggcggcacacgcgccgtttttgagccacgcggaagcgtttgccgcgctgtaccgcgactttgttgaaggggtttta

SEQ ID NO: 68125 - DNA, 363 bp, Neisseria meningitidis; identical to SEQ ID NO: 54044

SEQ ID NO: 68126 - DNA, 1332 bp, Neisseria meningitidis
atgaacacaacatcccaatttaccagtaatttctggaatatatatattgcagttattgtcttactgagctttatcgctttggcttggctgctgctgtctcaaaatgttgtcaaacgtccgaagaagggcgaagaagtacaaactacgggtcatgagtgggacggcattgccgaatacgacaatccgctgccccgctggtggttttggctgtgtgttttgacgtggctgttcggtatcggttatctggttatgtatccgggtgtcggcgactacaaaggtctgctgaaatggaccagccataaccaatatgaaaaagaggtcaaaaaagccgatgagcaatacggcaaactgtatgccaagtttgcggatatgccgattgaaaaagtggcaaaagaccctcaagccaagcaaatcgcccaaaacctgtttaacacttattgtatccagtgccacggctctgatgctaaaggctctaaaggttttccgaatctgaccgatagcgattggttgtggggcggtgatcccgataaaatccacgagaccatcgaaaaaggccgtgttgcgactatgcctgcctggggtcctgctttgggcgaagaaggcgtgaaagacgttgcccattatgtgatgtccctttcaaaacccgaaggtcagtatgatgaggaacgtgccgcgcgcggacaagccttgttcagcggtccgcctgccaactgtttcacttgccacggcgataagggacaaggtatccaaggtttgggtccgaacctgactgatgacgtgtggttgtggggcggtacgcaaaaatccattatcgaaaccattaccaacggtcgcagcagccaaatgcccgcttggggacatttcttggataaagacaaactgcatattatgactgcttatgtatggggtctttccgataaagacggtaaagctccggtgaaaaaagccgagcctgcaccgactcccgcaccggcggcagaacccgcagcctctgctcctgcagaagcagcacaagccgtgtccgaagccaaacctgccgcagcagaacctaaagccgaggaaaaagccgcacctgctgccaaagcggacggcaaataggtttatgaaaccgtttgtgccgcctgccatggcaatgcaattccgggtattccccatgtaggcatcaaagccgattgggccgaccgcatcaaaaaaggcaaggacacgttgcacaaacacgcgatcgaaggtttcaatacgatgcccgcaaaaggcggtcgcggcgatttgagcgatgatgaggttaaagctgcggttgactatatggtcaaccagtcaggcggcaaattctaa

SEQ ID NO: 68127 - DNA, 375 bp, Neisseria meningitidis; identical to SEQ ID NO: 41996

SEQ ID NO: 68128 - DNA, 1179 bp, Neisseria meningitidis
atggttatgcaaattaaatgcaaattcaattggttggtacttatgaccgctacaatggttgtgggttgtagttctttgccaacaacagggccgagtgctaagaaagtagaatctttaagtcaggtatcttctgaaactcaaatccctgaagtggaattgattgatgtcaaccatgctgtggcgcagtctttgtataaggcccaagtaaatcagtccttcactcagtttggcgatggctacgcttcggctggtacgctgaatattggtgatgtattggatattatgatttgggaagcgccgccggcggtattgtttggtggtgggatttcttcgatgggatcgggtagcgcacagcaaactaaattaccggagcagttggtcacggcacgtggtacagtttctgtgccgtttgttggcgatatttcggtggtcggtaaaacgccggggcaagttcaggaaatcattaaaggccgtctgaaaaaaatggccaatcagccacaagtgatggtgcgtttggtgcagaataatgcggcgaatgtgtcggtgattcgtgctgggaatagtgtgcgtatgccgctgacggcagccggtgagcgtgtgttggatgcggtggctgcggtaggtggttcaacggcaaatgtgcaggatacgaatgtgcagctgacacgtggcaatgtagtacgaactgttgccttggaagatttagttgcaaatccgcgacaaaatattttgctgcgtcgcggtgatgtggttaccatgattaccaatccctatacctttacgtctatgggtgcggtggggagaacacaagaaatcggtttttcagccagaggcttatcgctttctgaagccattggccgtatgggcggtttgcaagatcgccgttctgatgcgcgtggtgtgtttgtgttccgctatacgccattggtggaattgccggcagaacgtcaggataaatggattgctcaaggttatggcagtgaggcagagattccaacggtatatcgtgtgaatatggctgatgcgcattcgctattttctatgcagcgctttcctgtgaagaataaagatgtattgtatgtgtcgaatgcgccgttggctgaagtgcagaaattcttgtcgtttgtgttctcgccggttaccagtggcgcgaacagtattaataatttaactaattaa

SEQ ID NO: 68129 - DNA, 1218 bp, Neisseria meningitidis; identical to SEQ ID NO: 45979

SEQ ID NO: 68130 - DNA, 927 bp, Neisseria meningitidis
atgaaagtcatcttcgccggcacacccgattttgccgccgccgccttaagagccgttgccgccgccggttttgaaattccgctggtgctgacccagcccgaccgtccgaaagggcgcggtatgcaactgactgccccgcccgtcaaacaagccgcgctggaactcggtttgcgcgtcgaacagcccgaaaaactgcgtaacaacgccgaagccctgcaaatgctcaaagaggtcgaggcagacgtaatggtggttgccgcctacggtttgattctgccgcaagacgtgttggatgcgccgaaacacggctgcctcaacatccacgcttcgctgctgccccgttggcgcggcgcggcgccgattcagcgcgcgattgaggcaggcgatgccgaaaccggcgtgtgcattatgcagatggacatcggtttggacaccggcgatgtggtcagcgaacaccgctacgccatccgacctaccgataccgccaacgaagtccacgacgcgctgatggaaatcggtgcggcggcggttgttgccgatttgcaacagcttcaaagcaaaggccgtctgaacgcggtcaaacagcccgaagaaggtgttacttacgcccaaaaactaagcaaagaagaggcgcgtatcgattggagcgaaagcgcggcggttatcgaacgcaaaatccgcgccttcaaccccgtgcctgccgcgtgggttgagtatcagggcaagccgatgaaaatccggcgggcggaagtggtggcgcaacaaggcgcggcaggcgaagtgttgtcctgttcggcggacggtttggtcgttgcctgcggcgaaaacgcgctgaagattaccgaattgcagcctgccggcggcaggcgtatgaatatcgcggcgtttgcagcaggacggcatatcgaagcaggggcgaagctgtaa

SEQ ID NO: 68131 - DNA, 321 bp, Neisseria meningitidis
atgggtatgaatcaacaacgtttgactcaagtgattttggcacctatcgtttctgaaaaaagcaacgtattggctgaaaaacgcaaccaaatgacgtttaaggttttggcaaatgcaaccaaacctgaaatcaaagcggctgttgagctgctgtttggtgttcaagttgcttctgtaactaccgttacaactaaaggcaaaactaagcgttttggtcgtactttgggccgccgcagcgatgttaaaaaagcttatgtaagcttggctgccggtcaagagttggatttggaagccgctgctgcagctgcagataaggaataa

SEQ ID NO: 68132 - DNA, 2760 bp, Neisseria meningitidis
atgaaaagaatgttattcaacgcaacgcaggccgaagagctgcgcgttgccatcgtcgacggacaaaacctgctggatttggacatcgaaacgctgggcaaagaacagcgcaaaggcaatatctacaaaggcatcattacccgcatcgagccgtcgctggaagcgtgtttcgtcgattacggaaccgaccgccacggctttttgccgtttaaggaagtatcgcgttcatatttccgcgactacgaaggcggcagggcgcgtattcaggacgtactcaaagagggcatggaagtcatcgtccaagttgaaaaagacgagcgcggcaacaaaggcgcggcgctgaccactttcatcagcctggccggccgctatttggtattgatgccgaacaatccgcgcggcggcggcgtatcccgccgtatcgaaggtgaagagcgccaagagttgaaagccgctatggccgaactcgacattccaaacggcatgagcattattgcccgtactgccggcatcggccgtagtgcggaagagttggaatgggacttgaactacctcaaacaactctggcaagccattgaagaagcaggcaaagcacaccatgacccttacctgctctttatggaaagctcgctgctgattcgtgcgattcgcgactatttccgtcccgatatcggcgagattttggtggataatcaagaagtttatgaccaagttgccgagttcatgagctacgtcatgccgagcaatgtaggccgtctgaaactctatcaagaccacacgccgctgttttcccgcttccaaatcgaacaccaaatcgaaagcgcgttttctcgcagcgtcagcctgccttccggcggcgcaatcgtcatcgaccacaccgaagccctcgtctccatcgatgtcaactccgcacgcgccacacgcggtgcggacatcgaagacaccgccttcaaaaccaatatggaagccgccgaagaagtcgcccgacaaatgcgcctgcgcgacttgggcggcttggtcgtcatcgacttcatcgacatggaaaactccaaacaccagcgtgatgtggaaaacgtcctacgcgacgcgctcaaaaaagaccgcgcccgcgtgcagatgggcaaactctcccgtttcggacttttggaattgagccgccaacgcctgaaaccggctttgggtgaaagcagccacgtcgcctgtccgcgctgcgctggcactggtgtcatccgcggcatcgaatccaccgccctgcacgttttgcgcatcattcaagaagaagcgatgaaggacaacaccggcgaagtgcgcgcccaagtgcccgtcgatgtcgccaccttcctgctgaacgaaaaacgcgccgagctgtttgcgatggaagagcgtttggatgtcaacgtcgtcctgattccgaacatccacctcgaaaatccgcactacgaaatcaaccgcatccgcaccgacgacgtagaagaagacggcgaaccgagctacaagcgcgtcgccgagcctgaagaagacgaatccgccaaaccgttcggcggcgaaaaagccaaagccgcccgccccgaacccgccgtcaaaggcgtgcgccacaccagccccgccccgactgccgcccccgagaaaaaaacctcctggtgggacagcttcaaagcttggctcaaacgcattttcggcggcagcgaaacccaagccgcgcccgctgccgaaacctccgaaaaacgcagcacggcaaaccgcagcggcagccgcgccaacaaccgccgccaaaacccgcgccgcagcaaacgcgaaggcagcaaagtagaagtccgcgaagtggcaggcaaaactgccggacaggaagcgcgcgccgacaaagccgaaacgcgcaacaacggcaaccgccgccgcaacgaacgcggcgaccgtgccgccggacgcgccgacgaagcggaaatccaagaccgcaacatacagcctgccgcaaccgttgcagatgccgcaccgtccgaaaccgaagtgcaaaccggaaaacgccgccgcaacggcagccgcagcgaacgcggccaaaccgcgccggaaaccgccaccgttgccgaaacaaccgttcagacagcggaaaacacgccgtccgaaccgcataccgcagaagacaaaggcagcaagcccaaatccgaacgcaaccgccgcgaacgcgacagccgagatgccaaagaacgccgcgagcgcaacaatcagcgcgaccgccgtcaaaacggcaaaaaacgcaatattccgtctgccgccaaaatcgagcagtacctgaatattcacgacaccgccgacaaagtccgttccgccgccgcgcacgttttcggcgaaaccgacgcaaacgcgccgattaccgtcagcattgccgatccggttgcagaaagggatcttccgacagcatctcccgccgtttcaaacggcgacgcaccggtttatgatgcggcggaaaaaatccgccgtgccaccgccgccatcctgcccgaaggcgcgacaccgaaagccgaagcacaggaaatgccgtctgaaaacgcaacctttacggctgcggcggaacaggcacgggaaaccgcacaaaccggcggactcgtcctgatcgaaaccgaccctgccgcattgaaggcatgggcggcacaacccgaagtccaagccggacgcggtttgcgccgttccgaacagcccaagccgtctgaagccgcaaccgtccctgccgaagaaatgatccaagtcgaaacccggcaaggctga

SEQ ID NO: 68133 - DNA, 924 bp, Neisseria meningitidis
gtgcaaagcaagcagataaaaggcttcaagctttggaaatcttacgatgagcagttggagattctaagaagtagaggattgcagattgatgatgagaaaaaggcattaggatatttacgcaccattggttattaccgattaagcggttatttttactctttccgacaatttgctcctgaaagttctaagagcaggttggatgagtttattacagatactcgttttgaagatgtcaaaagcctttatatgttcgataagaaattgcggcaattggcattagatgcactggagagaattgaagtagcgcttcgggtaaatattgcccatacattaggacggcatgacccattggcttacaaagatagcaaatattctgccacaggtttcgaccatgcggaatggctggataggtataacaggctggtcgagcgcgaaaagaaaaccggttttgttaaacatcatttggaacattatgccgacttacctgtttgggtagcctgcgaagtatgggatttcggcacgatgtctatgctgtataaagggatgttgaataaagataaagactctattgccaaattgtatcgtttgaaagacggtaagcatctgcaaacacatctgcacgcatttaactttatccgcaacgtttcggcacatcacagtcgattatggaatagggatattacttttaaagccagcttgaaaggtttgtctgatgcagaatggaaatcattgcctatcaataaaccgtttgtgtatttttgcctgatgaaacggatgttggatgttatttgtccgcgaaccgaatggggaaaccgtcttcttgctttactggatgagtttcccgatgtcgcgaatgaagctgtaagtttgcgcgatatgggtttggaaaataatccgcgagactggagattgtggcagggataa

SEQ ID NO: 68134 - DNA, 885 bp, Neisseria meningitidis
atggaaatatggaatatgttggacacttggctcgatgccgtcccgatacgtgcggaggcggccgaatccgtggcggcggttgcggctttgctgctggcgcgcgcccttctgttgaacatccacttcagacggcatccggatttcagcatagaaagcaagcggcggtttctggttgccagccgcaatataacgctgcttttggtgctgttttcgctggcatttatctggtcggcgcaaattcaaacgctggctttgtcgatgtttgcggtggcggcggcggtcgtcgtggcgacaaaagaactgattatgtgtctgtcgggcagtattttaaggtctgccacccagcaatactcggtcggcgactatatcgaaatcaacggactgcgcgggcgcgtggtcgacatcaacctgttgaacacgctgatgatgcaggtcggcccgaaccccttggtcggacagcttgcgggaaccaccgtttctttccccaacagcctgttgttgagccaccccgtgcgccgcgacaatattttgggcgactacgtcatccatacggtcgaaatccctgttcccatccatttggattcggatgaagccgtatgccgtctgaaagccgtactcgagcccttgtgcgcgcccttgtgcgcgccctacatccccgccatccaacggcatttggaaaacgtgcaggcggaaaaactgtttatcacgcccgccgccagaccgcgcgttacccgcgtgccgtacgatgacaaggcataccgcatcatcgtccgcttcgcttcccccgtttcaaagcggctggaaatccaacaggcggttatggacgaatttttgcgcgtacaataccgcctgttaaatcaccccgccggctccgaaacactttaa

SEQ ID NO: 68135 - DNA, 1452 bp, Neisseria meningitidis
atgctttctttccttagcggcttattgagcttgggtatagaagtcttgtgggtaaggatgttttcgttcgcagcacagtccgtgcctcaggcattttcatttactctcgcctgttttctgaccggtatcgccgtcggcgcgtattttggcaaacggatttgccgcagccgctttgttgatattccctttatcgggcagtgcttcttgtgggcgggtattgccgactttttgattttgggtgctgcgtggttgttgacgggtttttccggcttcgtccaccacgccggtatcttcattaccctgtctgccgtcgtcagagggttgattttcccgctcgtacaccatgtgggtacggatggcaacaaatccggacgacaggtttccaatgtttatttcgccaacgttgccggcagtgcattgggtccggtccttatcggctttgtgatacttgatttcttgtccacccaacagatttacctgctcatctgtttgatttctgctgctgtccctttgttttgtacactgttccaaaaaagtctccgactgaatgcagtgtcggtagcagtttccctaatgttcggcatcctcatgttcctactgccggattctgtctttcaaaatattgctgaccgtccggataggctgattgaaaacaaacacggcattgttgcggtttaccatagagatggtgataaggttgtttatggggcgaatgtatacgacggcgcatacaataccgatgtattcaatagtgtcaacggcatcgaacgtgcctatctgctaccctccctgaagtctggcatacgccgcattttcgtcgttggattgagtacaggttcgtgggcgcgcgtcttgtctgccattccggaaatgcagtcgatgatcgttgcggaaatcaatccggcataccgtagccttatcgcggacgagccgcaaatcgccccgcttttgcaggacaaacgtgttgaaattgtattggatgacggtaggaaatggctgcgtcgccatcctgatgaaaaattcgacctgattttgatgaatacgacttggtactggcgtgcctattccaccaacctgttgagtgcggaatttttaaaacaggtgcaaagccaccttaccccggatggtattgtaatgtttaataccacgcacagcccgcatgcttttgctaccgccgtacacagtattccctatgcataccgctatgggcatatggtagtcggctcggcaaccccggtagttttccctaataaagaactgctcaagcaacgtctctcctggttgatttggccggaaagcggcaggcacgtatttgacagcagcaccgtggatgctgcagcacaaaaggttgtctctcgtatgctgattcagatgacggaaccttcggctggggcggaagttattaccgacgataatatgattgtagaatacaaatacggcagagggatttaa

SEQ ID NO: 68136 - DNA, 2025 bp, Neisseria meningitidis
atgaacgatatgactttatatttgataattgcccttgttccgttggcaggctcgttgattgcgggtttgttcggcaacaaaatcggtcgtgccggtgcgcatactgttacgatactcggtgtggcggtgtctgccgtgctgtcggcttatgtgctgtggggattcctcaatggcagccgtgccaagtttgatgagaacgtctatacctggctgacgatgggcggtttggatttctccgtcggcttcttggtcgatacgatgacggcgatgatgatggtcgtggtaacgggcgtatcgttgatggtgcatatctacaccatcggctatatgcacgatgaaaaagtcggctaccaacgcttcttcagctatatttctttgtttactttcagcatgttgatgctgattatgagcaacaacttcatccagctcttcttcggctgggaggctgtgggcttggtgtcgtatctcttgatcggtttctatttcaaacgtccaagcgcaacatttgccaacctgaaagcctttttgatcaaccgtgtcggcgacttcggctttttgctcggtatcggcttggtgcttgcctatttcggcggcagcctgcgctatcaagatgtattcgcttatctgcccaacgtgcaaaatgccaccatccagcttttccccggtgtggaatggtcgttgattactgtcacctgtttgctcctgtttgtcggtgcgatgggtaaatcggcacaattcccactgcacgtttggctgcctgattcgatggaaggcccgaccccgatttctgcattgattcacgccgcaaccatggttaccgccggtctgttcatggtatcgcgtatgtcgccgatttatgagatgagcagcactgcgctgtctgtcatcatggtaatcggtgcgattactgccctgtttatgggtttcttgggcgtgattcaaaacgacatcaaacgtgtggttgcgtattccaccttgtcgcaactgggctatatgaccgtggctttgggtgcgtctgcctattccgtggcgatgttccatgtgatgacccacgctttctttaaagccttgttgttcttggcggcaggcagcgcgattatcggtatgcaccacgaccaagacatgcgccacatgggcaacctgaaaaaatacatgccgattacttggctgaccatgctgatcggtaacttgtcgctgatcggtacgccgttcttctccggcttctattctaaagattcgattatcgaagcggcgaaatacagcaccctgccgggcagcggctttgcctattttgccgtccttgccagcgtgttcgttaccgcgttctacgcgttccgccaatactttatggtgttccacggcgaagagaaatggcgcagcttgcctgaacatcatgacgatcatcatggcgaagaacatcacagcttgggcaaaaacgacaatccgcacgaaagcccgttggttgttaccctgcctttgattttgcttgccattccgtccgtcatcatcggctacgttgccatcgagcctatgctttacggcgatttcttcaaagatgtgattttcgtcaacgccgacgcgcatccgaccatgcacatcatgaaggaagagttccacggcgcattggcaatggtgtcgcacagcctgcattcgcccgtactctaccttgctatcgcaggcgtgttgagcgcatggcttttgtacgtcaaactgccgcacctgccagcgaaaattgcacagacgttccgtccggtttacgttttgtttgaaaacaaatactacctcgacgccctgtatttcaacgtcttcgctaaaggcacgcgcgcactgggtaccttcttctggaaagtcggcgataccgccattatcgataacggcatcgtcaacggctctgccaaactggtcggcgcgattgccgcgcaagtgcgtaaagcccaaaccggctttatctacacttacgctgccgctatggtattcggcgtattggtactgctcggcatgaccttctggggattgttcagataa

SEQ ID NO: 68137 - DNA, 1173 bp, Neisseria meningitidis
atgatgaaaatcaaagccctgatgattgccgccgcattgctggcagcagccgatgtccacgccgcaccgcaaaaggcaaaaaccgcatccgccaaagctgccaaagctgccaaagctgccaaagctgccaaagctgccaaagctgccaaagttgccaaagttgccaaagttgccaaagttgccaaagttgccaaagttgccaaagttgccaaagttgccaaagttgccaaagttgccaaagttgccaaagttgccaaagttgccaaagttgccaaagttgccgccacggcgcaaaaagaagccgcacccgcacaacagcagggcggtatccgcttttcagacggcattgccgccgttgccgacaacgaagtcatcacgcgccgccggcttgccgaagccgttgccgaagccaaagccaacctgcccaaagacgcgcagataagcgaatccgagctgtcccgacaggtgctgatgcagcttgtcaaccaatccctgattgtacaggcgggcaaacgccgcaacattcaagcaagcgaagcggaaatcgatgccgtcgtcgcaaaaaatcccgccctcaaaaacctcagccccgcccaacgccgcgattttgccgacaacatcattgccgaaaaagtccgccagcaggcagtgatgcagaacagccgcgtgagcgaagctgaaatcgatgccttcctcgagcaggcgcaaaaacaaggcatcaccctgcccgaaggcgcaccgttgcgccaataccgcgcccaacacatcctgattaaagccgacagcgaaaacgccgccgtcggcgcggaaagcaccatccgcaaaatctacggagaggcccgcagcggcacagacttttccagcctagcgcgccaatattcgcaagacgcgagcgcgggcaacggcggagatttgggctggtttgccgacggcgtgatggttcccgcctttgaagaagccgtccacgcgctcaaacccggacaggtcggcgcgcccgtccgcacccaattcggctggcatatcatcaaattgaacgaagtgcgcgatgccggcacacctcaggaacgtatccgcaattccgtgcggcaatacatcttccaacaaaaagccgaacaggcaaccgtcaacctgttgcgtgacctgcattccggcgcgtatgtcgacatccgctaa

SEQ ID NO: 68138 - DNA, 2379 bp, Neisseria meningitidis
gtgctggcattgggcttctgtttcggcacgcattgcgccgccgccgatgccgttgcggcggaggaaacggacaatccgaccgccggaggaagcgttcggagcgtgtccgaacccatacagcctaccagcctgagcctcggttcgacctgcctgttttgcagtaacgaaagcggcagccccgagagaaccgaagccgccgtccaaggcagcggcgaagcatccatccccgaagactatacgcgcattgttgccgacaggatggaaggacagtcgcaggtgcaggtgcgtgccgaaggcaacgtcgtcgtcgaacgcaaccggacgaccctcaatgccgattgggcggattacgaccagtcgggcggcaccgttaccgcaggcgaccggttcgccctccaacaggacggtacgctgattcggggcgaaaccctgacctacaatctcgagcagcagaccggggaagcgcacaacgtccgtatggaaaccgaacacggcggacggcggctgcaaagcgtcagccgcaccgccgaaatgttgggcgaagggcattacaaactgacggaaacccaattcaacacctgttccgccggcgatgccggctggtatgtcaaggccgcttccgtcgaagccgatcgggaaaaaggcataggcgttgccaaacacgccgccttcgtgttcggcggcgttccccttttctatacgccttgggcggacttcccgcttgacggcaaccgcaaaagcggcctgcttgttccctcactgtccgccggttcggacggcgtttccctttccgttccctattatttcaaccttgcccccaatctcgatgccacgttcgcgcccggcgtgatcggcgaacgcggcgcggtctttgacgggcaggtacgctacctgcggccggattatgccggccagtccgacctgacctggctgccgcacgacaagaaaagcggcaggaataaccgctatcaggcgaaatggcagcaccggcacgacatttccgacacgcttcaggcgggtgtcgatttcaaccaagtctccgacagcggctactaccgtgacttttacggcaacaaagaaatcgccggcaacgtcaacctcaaccgccgtgtatggctggattatggcggcagggcggcgggcggcagcctgaatgccggcctttcggttctgaaataccagacgctggcaaaccaaagcggctacaaagacaaaccgtatgccctgatgccgcgcctttccgccgattggcgcaaaaacaccggcagggcgcaaatcggcgtgtccgcacaatttacccgcttcagccacgacagccgccaagacggcagccgcctcgtcgtctatcccgacatcaaatgggatttcagcaacagctggggttacgtccgtcccaaactcggactgcacgccacctattacagcctcaaccgcttcggcagccaagaagcccgacgcgtcagccgcactctgcccatcgtcaacatcgacagcggcatgaccttcgaacgcaatacgcggatgtttggcggagaagtcctgcaaaccctcgagccgcgcctgttctacaactatattcctgccaaatcccaaaacgacctgcccaatttcgattcgtcggaaagcagcttcggctacgggcagctctttcgcgaaaacctctattacggcaacgacaggattaacaccgcaaacagcctttccgccgccgtgcaaagccgtattttggacggcgcgacgggggaagagcgtttccgcgccggcatcggtcagaaattctatttcaaggatgatgcggtgatgcttgacggcagcgtcggcaaaaaaccgcgcaaccgttccgactgggtggcatttgcctccggcagcatcggcagccgcttcatcctcgacagcagcatccactacaaccaaaacgacaaacgcgccgagaactacgccgtcggtgcaagctaccgtcccgcacagggcaaagtgctgaacgcccgctacaaatacgggcgcaacgaaaaaatctacctgaagtccgacggttcctatttttacgacaaactcagccagctcgacctgtccgcacaatggccgctgacgcgcaacctgtcggccgtcgtccgttacaactacggttttgaagccaaaaaaccgatagaggtgctggcgggtgcggaatacaaaagcagttgcggctgctggggcgcgggcgtgtacgcccaacgctacgttaccggcgaaaacacctacaaaaacgctgtctttttctcacttcagttgaaagacctcagcagtgtcggcagaaaccccgcagacaggatggatgtcgccgttcccggctatatccccgcccactctctttccgccggacgcaacaaacgaccctga

SEQ ID NO: 68139 - DNA, 3606 bp, Neisseria meningitidis
atgtttcattttgcatttccggcacaaactgccctgcgccaagcgataaccgatgcctaccgccgtaatgaaatcgaagccgtacaggatatgttgcaacgtgcacagatgagcgacgaagagcgcaacgccgcctccgagcttgcccgccgtttggttacccaagtccgcgccggccgcaccaaagctggcggcgtagatgcgctgatgcacgagttttcactctccagcgaagaaggcatcgcgctgatgtgtctggcagaagccctgctgcgtatccccgacaacgccacgcgcgaccgcctgattgccgacaagatttcagacggcaactggaaaagccatttgaacaacagcccttccctcttcgtcaatgctgccgcctggggtctgctgattaccggcaaactgaccgccacaaacgacaaacaaatgagttccgcactcagccgcctgatcagcaaaggcggcgcaccgctcatccgccaaggcgtaaattacgccatgcggcttctgggcaaacagttcgtaaccggacagaccattgaagaagccctgcaaaacggcaaagaacgcgaaaaaatgggctaccgcttctccttcgatatgttgggcgaagccgcctacacccaagccgatgccgaccgctactaccgcgactatgtcgaagccatccacgccatcggcaaagatgcggcaggacaaggcgtttacgaaggcaacggcatttccgtcaaactctccgccatccatccgcgctactcgcgcgcccaacacggccgcgtgatgggcgaactgttgccgcgcctgaaagagctgttccttttgggtaaaaaatacgatatcggtatcaacatcgatgccgaagaagccaaccgtctggagctgtctttggatttgatggaggcactcgtttccgatcccgatttggcaggctacaaaggcatcggtttcgttgttcaagcctaccaaaaacgttgtccgttcgttatcgactacctgatcgaccttgcccgccgcaacaaccaaaaactaatgatccgcctcgtcaaaggcgcatactgggacagcgaaatcaaatgggcgcaagtggacggcttgaacggctatccgacctacacccgcaaagtccacaccgacatctcctacctcgcctgcgcgcgcaaactgctttccgcgcaagacgcggtattcccgcaatttgccacgcacaacgcctacaccttgggcgcaatctaccaaatgggcaaaggcaaagactttgaacaccaatgcctgcacggcatgggcgaaaccctgtacgaccaagtcgtcggcccgcaaaacttaggccgccgcgtgcgcgtgtacgccccggtcggtacgcacgaaaccctgcttgcctacttggtgcgccgcctgttggaaaacggcgcgaactcgtctttcgtcaaccaaatcgtcgatgaaaacatcagcatcgacacgctcatccgcagcccgttcgacaccatcgccgaacaaggcatccacctgcacaacgccctgccgctgccgcgcgatttgtacggcaaatgccgtctgaactcgcaaggcgtggatttgagcaacgaaaacgtattgcagcagcttcaagaacagatgaacaaagccgccgcgcaagacttccacgccacgtccattatcaacggcaaagcctgcgatgtcggcgaagcgcaaccgattaaaaatcctgccgaccacgacgacatcgtcggcacagtcagctttgccgatgccgcgcttgcccaagaagcgattggcgcagccgttgccgcattccctgaatggagcgcgacacctgccgccgaacgcgccgcctgcctgcgccgtttcgccgacctgctcgaacagcacacccccgcgctgatgatgcttgccgtgcgcgaagcgggcaaaacgctgaacaacgccattgccgaagtgcgcgaagccgtcgatttctgccgctactacgcaaacgaagccgaacacaccctgcctcaagacgcaaaagccgtcggcgcgattgtcgccatcagcccgtggaacttcccgctcgccatctttaccggcgaagtcgtgtccgcattggcggcaggcaacaccgttatcgccaaacccgccgaacaaaccagcctgattgccggttatgccgtttccctcatgcacgaagccggcatcccgacttccgccttgcagcttgtcctcggcgcaggcgacgtgggtgcggcattgaccaacgatgcccgcatcggcggcgtgattttcaccggctcgaccgaagtggcgcgcctgatcaacaaagcccttgccaaacgcggtgacaatcccgtcctaattgccgaaaccggcggacaaaacgccatgattgtcgattccactgcacttgccgaacaagtctgcgccgacgtattgaactccgccttcgacagcgcgggacaacgctgctccgccctgcgtatcttgtgcgtccaagaagacgttgccgaccgtatgctcgacatgatcaaaggcgcgatggacgaactcgtcgtcggcaaaccgattcaactcaccaccgatgtcggctccgtcatcgatgccgaagcgcagcaaaacctgttgaaccacatcaacaaaatgaaaggcgttgccaagtcttaccacgaagtcaaaaccgctgccgatgtcgattccgaaaaatccacgttcgtccgccccatcctgtttgaattgaacaacctcaacgaactgcaacgcgaagtcttcggtcccgtcctgcacgtcgtccgctaccgcgccgacgaactcgacagcgtcatcgaccaaatcaacagcaaaggctacgccctgacccacggcgtacacagccgcatcgaaggcacggtacgccacatccgcagccgcatcgaagccggcaacgtttacgtcaaccgcaacatcgtcggcgcagtcgtcggcgtacagcccttcggcggacacggtctgtccggcacaggccccaaagcaggcggttcgttctacctgcaaaaactgacccgcgccggcgaatgggttgccccgaccctgagccaaatcggacaggcggacgaagccgcactcaaacgcctcgaagcactggttcacaaactgccgttcaacgccgaagagaaaaaagccgcagcggccgctttgggacacgcccgcatccgcaccctgcgccgtgccgaaaccgtccttaccggaccgaccggcgagcgcaacagcatctcatggcacgcgccaaaacgagtttggatacacggcggcagcacggttcaagcctttgccgcactgaccgaacttgccgcctccggcgtacaggcagtggtcgaacccgacagcccgctggcttcctacaccgccgacttggaaggtctgctgctggtcaacggcaaacccgaaaccgtcggcatcagccacgttgccgccctgtcgcctttggacagcgcgcgcaaacaggaacttgccgcccacgacggcgcactcatccgcgtcctcccttcggaaaacggactcgacatcctgcaagtttttgaagaaatctcttgcagcgtcaacaccacagccgccggcggcaacgccagcctgatggcggttgccgactga

SEQ ID NO: 68140 - DNA, 1104 bp, Neisseria meningitidis
  misc_feature 8, 9, 10, 11, 12: 'n' is a, c, g or t
gtgtgtgnnnnngttgccgcgctgatttatttcaaccattacgaacacccacttaaaaaatttttccaatggaaaatcaccgttgccgccggtttgatttcctattcgctttatctgtggcattggccgatattggcctttatgcgctatatcggtccggacaacttgccgccttattcgtcggcggcagcgatcgtcctgactctggcgttttccctgatttcttatcactgcatcgaaaaaccgtttaaaaaatggcaaggttcgttcgcacaatccgttttatggatttatgccttgcctatgctcattttgggggcgggctcgttttttgcgatgagactgccgtttatggcgcaatacgaccgcttggggctgacgcgttccaacacctcctgccacaacaataccggcaaacaatgcctatggggggatacggaaaaacagccggaactgctggttttgggcgactcccacgccgaccattacaaaacattcttcgatgccgtgggcaaaaaagaaaaatgggctgccactatggtttccgccgacgcttgcgcctatgtggaaggctacgcgtcccgcgtattccaaaactgggccgcctgccgcgccgtttaccgctatgccgaagaacacctgccccggtattcaaaagtggttttggcgatgcgctggggcagccaaatgcccgaaaacagccgctcccttgcctatgatgccggttttttccaaaaattcgaccgtatgctgcacaaactctcatccgaaaaacaagccgtttacctgatggcggacaacttggcctcgtcttacaacgtccagcgcgcctatatcttgtcttcccgcataccgggttaccgccaaaccctgcacccggacgacgaaagcaccctgaaagccaatgcccgcatcagggaattggcagccaaataccccaacgtctatattattgatgccgccgcctatatccccgcagattttcaaatcggcggattgccggtttactcggacaaagaccacatcaacccttacggcggcacggaattggcaaagcgtttttccgaaaaacaacggtttctcgatacgcgccataaccattga

SEQ ID NO: 68141 - DNA, 315 bp, Neisseria meningitidis
  misc_feature 8, 9, 10, 11, 12: 'n' is a, c, g or t
gtgtgtgnnnnncccatgaagaaaatgttcgtgctgttctgtatgctgttctcctgcgccttctcccttgcggcggtaaacatcaatgcggcttcgcagcaggagctggaggcgctgccgggcataggcccggcgaaggcgaaggccattgcggaataccgtgcgcaaaacggtgcgttcaagtctgtagacgatttgaccaaggtaaagggcatcggccctgcggtgctggcgaagctgaaggaccaggcttcggtcggcgcgcccgcaccaaaaggcccagccaaaccggctataccggccgctaaaaaatag

SEQ ID NO: 68142 - DNA, 450 bp, Neisseria meningitidis
atgactgataatcgggggtttacgctggttgaattaatatcagtggtcttgatattgtctgtacttgctttaattgtttatccgagctatcgcaattatgttgagaaagcaaagataaatgcagtgcgggcagccttgttagaaaatgcacattttatggaaaagttttatctgcagaatgggaggtttaaacaaacatctaccaaatggccaagtttgccgattaaagaggcagaaggcttttgtatccgtttgaatggaatcgcgcgcggggctttagacagtaaattcatgttgaaggcggtagccatagataaagataaaaatccttttattattaagatgaatgaaaatctagtaacctttatttgcaagaagtccgccagttcgtgtagtgacgggctggattattttaaaggaaatgataaggactgcaagttatttaagtag

SEQ ID NO: 68143 - DNA, 867 bp, Neisseria meningitidis
atgaaaggcatcatactggcaggcggcagcggcacgcgcctctaccccatcacgcgcggcgtatccaaacagctcctgcccgtgtacgacaaaccgatgatttattaccccttgtcggttttgatgctggcgggagtccgcgatattttggtgattaccgcgcctgaagacaacgcctctttcaaacgcctgcttggcgacggcagcgatttcggcatttccatcagttatgccgtgcaacccagtccggacggcttggcacaggcatttatcatcggcgaagaatttatcggcaacgacaatgtttgcttggttttgggcgacaatattttttacggtcagtcgtttacgcaaacattgaaacaggcggcagcgcaaacgcacggcgcaaccgtgtttgcttatcaggtcaaaaaccccgaacgtttcggcgtggttgaatttaacgaaaacttccgcgccgtttccatcgaagaaaaaccgcaacggcccaaatccgattgggcggtaaccggcttgtatttctacgacaaccgcgccgtcgagttcgccaaacaaatcaaaccgtccgcacgcggcgaattggaaatttccgacctcaaccaaatgtatttggaagacggttcattgtccgtccaaatattaggacgcggtttcgcatggttggacaccggcacccacgagagcctgcacgaagccgcttcattcgtccaaaccgtgcaaaacatccaaaacctgcacatcgcctgcctcgaagaaatcgcctggcgcaacggttggctttccgatgaaaaactggaagaattggcgcgcccgatggcgaaaaaccaatacggccaatatttgctgcgcctgttgaaaaaataa

SEQ ID NO: 68144 - DNA, 378 bp, Neisseria meningitidis
atgtgtgagttcaaggatattataagaaacgttccttattttgaggggtatgacgaaaattcatttattggcaaatggtatgatgacggggtgtgggatgatgaagaatattggaagttggagaatgatttaattgaggttagaaaaaaatatccttatccgatggatataccaagatatgttgtcattggaatcggtaccattattgatttcttaatggttccaaattggaaactttttgaaattaaagcttccccttggctacctgatagcgtaggaattaatgaacgttatgaaaggcttaaaacaatgctccgttatatttttaccgagaaagacatagtcaacgtgcgatttgattattacaacaaaaaatag

SEQ ID NO: 68145 - DNA, 399 bp, Neisseria meningitidis; identical to SEQ ID NO: 46943

SEQ ID NO: 68146 - DNA, 336 bp, Neisseria meningitidis
atgatggctgataaggaacaagtagaaaagatgatttattctgaaaataaacagagtgttattgacggtatgctcggtatgaccttcagttcagaggaggatgaaatcccttggatttctgagaaattgacggagttgtcgaagcataaagacttgaatattgccagattgtcattaacctgtttcggacatctcgctaggatgcatgaaaatatcggcgattgcgataaagtgattgctttattgcgctcaaaacaaggcaatccggattttcaaggttttgccgaagatgcgttagacgatatttccttctttatatttaaaaagcatccgtaa

SEQ ID NO: 68147 - DNA, 516 bp, Neisseria meningitidis
ttgagaaaacaatcaaaaatattacaaaaaatgccaatcgaaaagcaaaaggagaagagcatggtcgacgcggtcgttaaaactcccgaatttttaccttttacttctgtaggaatattccgttttggtgcggatataacacagtacaaaaacatactgggaacttttatgtatgaacctcctgatgagtttagaacagaatattatgaatctcccgactcaaatttactaattgccgtcaagaaaaacaaaattatttcgatattttgttatcaggagctatattttatgggcgttaatataataggtctgaattttgaagattttaaacagcttttccatcaccctaaatcatacggtgttgataaatattatttatcaaatgaatcttatccgacatatgtctatgagtttgatgaaataggagtacaagcttgggaagcaaaagggaaaattgttactatcattgccgggggcaaagacaattattcgacagaaccttactacgatgaataa

SEQ ID NO: 68148 - DNA, 543 bp, Neisseria meningitidis
atgaggacacaccgcaagacctgctctgcggtgtgttttgcttttcagacggcatcgaaacccgccgtttccatccgacatcccagcgagaacattatgagcctgaaaatccgccttaccgaagacatgaaaaccgcgatgcgcgccaaagaccaagtttccctcggcaccatccgcctcatcaacgccgccgtcaaacagtttgaagtggacgaacgcaccgaagccgacgatgccaaaatcaccgccatcctgaccaaaatggtcaaacagcgcaaagacagcgtgaaaatctacactgaagccggccgtcaggatttggcagacaaagaaaacgccgaaatcgaggtactgcaccgctacctgccgcaaatgctctccgccggcgaaatccgtactgcggtcgatgccgccgttgccgaaaccggcgcggcaggtatggcggatatgggcaaagtgatgggcgtattgaaaacccgacttgccggcaaagccgatatgggcgaagtcaacaaaatcctgaaagccgtgctgaccgcctga

SEQ ID NO: 68149 - DNA, 642 bp, Neisseria meningitidis
atgagatgttttatgattcaaaatgttgttacttcaataatcctgtattctgggacagccgtagacttacttattatcctaatgttattttttgccaaaagaaaaagcagaaaagacatcattaacatctatttaggacaatttctaggctctgttagcctgatattgctaagtttgctttttgcatttgtcttagattatattcctagtaaagagattttaggtttgctcggcttgattccaattttcctaggcatcaaagttttgctgttaggagattctgatggagaggctattgccaaagagggtttgcgcaaagataataaaaacctgatttttctagtcgctatgattacttttgcaagttgtggtgctgacaatattggtgtctttatcccatattttactaccttaaatttagcgaatttgatagtggctttacttacctttctagtcatgatttatctcttggttttttctgcccaaaaattagcacaagtcccttctgttggagaaactttggaaaaatatagcagatggtttgttgctgttgtttatttgggattgggggtatatatcctgattgaaaacaacagttttgatatgctatggactgtgtcgggccaggaaaaaatattatga

SEQ ID NO: 68150 - DNA, 924 bp, Neisseria meningitidis
atgaatacaggcaaaccccaaaaacgtgccgtcaacggtgttttgctcttggacaaacccgaaggcctttccagcaacaccgcgctgcaaaaagcgcggcgtttgttccgtgccgaaaaagccggacataccggcgtgctcgaccctttggcaaccgggcttttgcccgtctgcttcggcgaagcgaccaagttcgcccaatacctgctggatgccgacaaagcctacaccgccacgctgaaactcggcgaagccagcagcacgggtgatgccgaaggcgaaatcatcgctgccgcacgcgccgatatttccttagccgaatttcagacggcctgccaagccctgacaggcaacatccgccaagtgccgccgatgttttccgccctcaagcacgaaggcaaaccgctgtacgaatacgcccgcaaaggcatcgtcatcgaacgcaagccgcgcgatattaccgtttacgccatcgatattgccgagtttgactcacccaaagccgtcatcgacgtgcgttgcagcaaaggcacctatatccgcaccctcagcgaagacatcgccaaacacatcggcacgttcgcccacctgaccgccctgcgccgcaccgaaaccgccggctttaccatcgcccaaagccacacgctcgaagccttggcaaacttggacgaaacagaacgcgacagcctgctgctgccctgcgacgtattggttgcccattttccccaaaccgttttaaacgattatgccgtccatatgctccaatgcgggcaacggccgcgtttcgatgaagacctgacttccgatacgccggtacgcgtttacacggaaaacggccgctttgtcggcctggcggaatatcaaaaagaaatatgccgtctgaaagccttgcgcctgatgaacacggcggtatctgccgcctga

SEQ ID NO: 68151 - DNA, 468 bp, Neisseria meningitidis; identical to SEQ ID NO: 60184

SEQ ID NO: 68152 - DNA, 561 bp, Neisseria meningitidis
atgaatatgaaaaccttattagcactagcggttagtgcagtatgttcagttggtgttgcgcaagcacacgagcataatacgatacctaaaggtgcttctattgaagtgaaagtgcaacaacttgatccagtaaacggtaacaaagatgtgggtacagtgactattactgaatctaactatggtcttgtgtttacccctgatttacaaggattaagcgaaggcttacatggtttccacatccatgaaaacccaagctgtgagccaaaagaaaaagaaggtaaattgacagctggtttaggcgcaggcggtcactgggatcctaaaggtgcaaaacaacatggttacccatggcaagatgatgcacacttaggtgatttacctgcattaactgtattgcatgatggcacagcaacaaatcctgttttagcaccacgtcttaaacatttagatgatgttcgcggtcactctattatgatccacactggtggtgataatcactccgatcatccagctccacttggcggtggcggcccacgtatggcatgtggcgtgattaaataa

SEQ ID NO: 68153 - DNA, 819 bp, Neisseria meningitidis
ttgttaatccaatatactttatgccgctaccgcaaccgactggctcaagacaataccctgtctgaactgttggaactgattaaccgccaactgaccgaaaaaggtttaaaaatagagaaagcatccgctgccgtcgttgacgccaccattattcagaccgccggcagcaaacagtgtcaggccatagaagttgacgaagaaggacaaatcagcggccaaaccacaccgagtaaagacagcgatgcccgttggataaagaaaaacggcctctacaaactcggttacaaacaacatacccgtaccgatgtggaaggctatatcgagaaactgcacatcatccccgccaatacccatgagtgcaaacacctgccgccgttgttggaagggttacccgaaggtacgaccgtctatgccgacaaaggctatgacagtgcggaaaaccggcaacatctggaagaacatcagttgctggacggcattatgcgcaaagcctgccgcaaccgtccgctgtcggaaacgcaaaccaaacgcaaccggtatttatcgaagacccgttatagtggattaaatttaaatcaggacaaggcgacgaagccgcagacagtacaaatagtacggcaaggcgaggcaacgccgtactggtttaaatttaatccactatatgtggtcgaacagagcttcggtacgctgcaccgcaaattccgctatgcgcgggcagcctatttcggactgattaaagtgagtgcgcaaagccacctgaaggcgatgtgtttgaacctgttgaaagcggccaacaggctaagtgcgcccgctgccgcc

SEQ ID NO: 68154 - DNA, 405 bp, Neisseria meningitidis
ttggagtctcaaatggccaaatctttcaaccaagcagcttctgaacttactgatatattccctaatatctctctaaccgactttgacggtgtgaattacccagtaaccgttaattgtcctatgcacgggaacgttcgttattcgacatttaatgcccttataaagtcaaagtacgggtgtcctgagtgtgctaagatgtcaaaaacccaaacacctccaaatgtagggaagcccctcctcatcctcgacacaacgaccaacgaaacactcacgttcccaagcgttactgccgcaggtgctgctttaggtgtacatttccaacaaatcaatcacaggctcaagggtcgaacgtcgcccgacaaccttatttcaaacaggtacaaagtgcttgggtacgataggtaa

SEQ ID NO: 68155 - DNA, 411 bp, Neisseria meningitidis; identical to SEQ ID NO: 42958

SEQ ID NO: 68156 - DNA, 438 bp, Neisseria meningitidis
ttgaaaatttctatattttggttgtataatgctttcattttagaaaggtttataatgccaaaatcactctcgctacaagatgttcagttaaggttttccagtaaatttcctgataagacggttttgaagttcactaaaaactacgaaccggtaacaatccaatgccctttgcatgggtcggttgtttacgggaatctacaagctgccatgaaatcctcaacaggatgtcctgaatgtactcgaaatcccgaaaagccctctccaaacgccgttgccattaggttggaggacacagagacagaggaaatctacgagtttgcaagtacactggctgccagtaaatttatcggttgctccaacagcactttagctgtacgtttaagcggacgcactccgtttgaccgattgattaggtatcgttataggttggtaaagtaa

SEQ ID NO: 68157 - DNA, 393 bp, Neisseria meningitidis; identical to SEQ ID NO: 43975

SEQ ID NO: 68158 - DNA, 561 bp, Neisseria meningitidis; identical to SEQ ID NO: 43976

SEQ ID NO: 68159 - DNA, 261 bp, Neisseria meningitidis
ttgttgatgtgtgtactattgcataggcagttaagccatgcaggagatgaaagtgtatatgtcgcgcaaagcccattagccgcaagcgaggggcggggtgcgcgagagagaggggggcaggtgctaagtcattggttatctccttactatctatctaactacgggtgcattatgcgcctatgcctgttgtttgtcaaacactatacagttaaaatgtgtaaagatttagtaaagacgtataccatttttctttacatttag

SEQ ID NO: 68160 - DNA, 1197 bp, Neisseria meningitidis; identical to SEQ ID NO: 46004

SEQ ID NO: 68161 - DNA, 318 bp, Neisseria meningitidis
atgaatatattaccaagctggctgcgagtcggtatgaatatagcaatgctgggcatgatacactcagatatcaggttaattaccgtagattacgaggaaggaagaaggtttttaaaaatcaaaaattatttatcaagagaagccttcacagaagaccatgaagatatggaatatttgattacagagttatggtctatgtgtggagaatattttgatgaagctgactttgaatgtatttattctaatcattcttctatggagttaaaccaaataaatggtgcagtattcaggagaaaggacttaatttcgcaagcgtag

SEQ ID NO: 68162 - DNA, 324 bp, Neisseria meningitidis
atgataattgacaaaaaatctacttcagatgtactgaaacaatatcaagaactagggtttgatttgacaaaacctatgataatagagttttttataggaggttctcaaaagaatctgcaatcaatagaaagccggctcatttcttatcggcaagattttcaaatcagtattgaacaagatgaattcggagaaatgtggacttgctattgttccgtcaatatcgtcccttcccttgaaaacattttagctattgaaactacgttatttggtattgcacaaaaaaatgattgtaattatgaaggttttggttcgtatgggaactaa

SEQ ID NO: 68163 - DNA, 378 bp, Neisseria meningitidis
ttgtactgtctgcggcttcgtcgccttgtcctgatttttgttaatccactatataagcgcaaacaaatcggcggccgcccgggaaaacccgccccgaacgcgtccggaaaatatgcttatcgatggaaaacgcagccgcatcccccgccgggcgtttcagacggcacagccgccgccggaaatgtccgacgcttaaggcacagacgcacacaaaaccgtatgcctgcacctgcaacaatccgacagataccgctgttttttccaaaccgtttgcaagtttcacccatccgccgcgtgatgccgccgccaccatttaaaggcaacgcgcgggttaacggctttgccgtcggcaaagcagccggataccgctacgtatct

SEQ ID NO: 68164 - DNA, 465 bp, Neisseria meningitidis; identical to SEQ ID NO: 36919

SEQ ID NO: 68165 - DNA, 288 bp, Neisseria meningitidis; identical to SEQ ID NO: 36767

SEQ ID NO: 68166 - DNA, 435 bp, Neisseria meningitidis
atgcgccgggcgttgattgcgaaaattaagattgctcaaaaggagctgggcttggatgacggtacctatcgcgcggtgttggagcgtgtgacggataagcggtcgtgtgcggatatggatgtttctgaacttgagtctgttgtcgctgatatgcggtcgcacggatttaagcctaaagcaaaaggtaacccacacggcaaaccgcatctgcgtcggacatcatcagcggcaatgctggacaaagtcgaagccctgctgaccgtcggcggcaaacattggaactatgcacacgcaatggcgcggcggatgtttggtaaggataaggtcgaatatttagacgatacgcagctacataaactggttgctgcgttgcagattgcggaaaacaggaaaacggaaaaagcgagtggggatgatggggttcgaaaaagttga

SEQ ID NO: 68167 - DNA, 339 bp, Neisseria meningitidis
ttgttaattcactatatcgacatcgccaaacgaaacttcgtcatcgccgtttcgtctttgtctaaaaccaaaaccgaaaccaacaaccccaaaggtatcgcccatactatcgaataccttaaaaaacacaaggtcgccctcgtcgtgacggaaagtaccggcggtctcgaaatccccgccgccaaagccatccgccgagcaggcatagccgtgattatcgccaacccgcgtcagacgcatcagtttgcccaatcgcagccgctgaccaaaaccgacgccaaagatgccaaaatgcccgccttcttcgcacagatgacggcacagaaagaagattcgtaa

SEQ ID NO: 68168 - DNA, 225 bp, Neisseria meningitidis; identical to SEQ ID NO: 40020

SEQ ID NO: 68169 - DNA, 1536 bp, Neisseria meningitidis
gtgtctgattccaaaacgaaagaacgcgccacattcggcacgcgccgcgcgtttatgattgccgccatcgggtccgccgtcggcttgggcaatatttggcgtttcccctatattgcttttgaaaacggcggcggcgcattcatcctgccctatctggtcgcgcttctgacggcgggcatcccgctgctgctgctcgattatgccatcggccaccgttaccgtggttctgcgcccttggctttccgccgcctcggacgatggtttgagccggtcggctggtggaacgtgatgaccaatatcgtcatctgcatctattacgcggtaattatcggttgggcggcaagctatacctattattcggtcaacgccgcctggggtgcggatccgcagggttttttctttaaggacttcctgcaaatggcgggcccggaagccttgggtttggattttgtcggcaaagtcgccggtcctttggcgggcgtgtgggtttttaccgccgccattatggctttgggcgtgcaaaagggcgtggcgcgcgcctcgtcgttctttatgccgctgcttttggtgatgtttttgattatggtcggcatttcgctgaccctgccgggcgcggcaaagggcttggacgcattgtttacgcccgactggtcgaaactcgccgattccaaggtctgggtggcggcatacgggcagattttcttttcgctttccatctgcttcggcattatggttacctattcttcttatttgaagaaaaaaaccgacttgggcggaacggggctggtggtcggttttgccaacagcagctttgaactgctctcgggcatcggcgtgtttgccgcattgggctttatggcgcaggcgggcggtaaggcggtcaacgaggttgcctcaggcggcatcggtttggcgtttatcgcctttccgaccattatcaaccaggcaccgatgggctggctgatcggcatattgtttttcggttcgctggtgttcgccggcgttacgtcgatgatttccatccttgaagtgattgtggcggcgattcaggacaagctgaacatcgggcgcgtcaacgccacgctgctggtctgcattccgatgggcattgtttccacgctgctgttcggtacggcgacggggctgccggttttggacgtgatggacaaattcgtcaacacctacggcattgttgccgccggctttgtttatgttgccgccatcatcatcagcggcaggctgccggaattacgcaagcacctgaacgctttgtcctccatccgcatcggcggcttgtggacggtctgcgtcgtggttaccgtcgtgatgctcggctatatgctgtttaaagataccagcggcctgatggagaaaaattacgaaggttatccggatggtttcctcagtattttcggctgggggatgtcggcggcgttggtcgtgttcgggctgctgctgtcgttgctgccttggaaacacggtcaggatttcaacgtcaaagacgaacacgaacatgaacaaggagacgaaaaatga

SEQ ID NO: 68170 - DNA, 864 bp, Neisseria meningitidis
atgagtgagattggtttggtaaagatctattctggaaaagtgcgcgatttatatgaaatcgacgataaacgtatgctgatggtcgcttccgaccgcctgtccgcgtttgatgtgattttggacgacccgattccgagcaaaggggagattctgacgcagatttccaatttttggtttaaaaaactggcgcatattatgcccaaccactttactggtcaaacggtttacgatgttttgcctgaaaacgaagccaaagctttagagaaacgcgccgtcgtggctaaaaagctcactccggtgaaagtagaggcgattgtgcgtggttatctggcaggcagcggttggaaagattatcaaaaaaccggctcggtttgcggtattcaactgcctgaaggtatgcaggaagcgcaacaactgcctgaagtgatttttacgccctcaaccaaagccgcagtcggcgatcacgatgaaaacatcagctttgaagaatgcgaacgcattatcggaaaagaattggcggcggaagtgcgcgccaaagcgattcagctttatacagaagcggcggaatatgccaaattgcgcggcatcatcatttgcgataccaaatttgaattcggtttggatacaaacggtacgctgacgctgatggatgaggtattgactcccgattcgagccgtttttggccggcggatcaatatgaagtcggcaccaatccgccgtcttttgacaaacaattcgtccgcgactggctggaacaaagcggttggaacaaaaaagcccctgtgccgaaagtgcctgccgatgtgattcagaaaactgtcgagaagtatcgggaagcattgactttgctgactcaggattga

SEQ ID NO: 68171 - DNA, 198 bp, Neisseria meningitidis; identical to SEQ ID NO: 36382

SEQ ID NO: 68172 - DNA, 306 bp, Neisseria meningitidis; identical to SEQ ID NO: 37429

SEQ ID NO: 68173 - DNA, 354 bp, Neisseria meningitidis
atgaaaaattgcgaatttttttatgacccgacaagggcaatctatgatagcggtgcagattatttaaccagagaaaaacatagattagtcgtaattgcaaatagtgcttgggggctattgcttaatttatcttgttattatgacgaggttttggaaaagcggaaaataccgttcggcaaacaggaaattgatgacgatatggacaaagtgtccgcccttaagcggaagtttaaagatatttctgaaatcaaagtaggggatggttgggaatacccgttcaattatgagcagggaatgaaagaattagatgaagtgctattgaaatacattcccttttttgaagaagaacgataa

SEQ ID NO: 68174 - DNA, 216 bp, Neisseria meningitidis; identical to SEQ ID NO: 43890

SEQ ID NO: 68175 - DNA, 393 bp, Neisseria meningitidis; identical to SEQ ID NO: 40756

SEQ ID NO: 68176 - DNA, 339 bp, Neisseria meningitidis; identical to SEQ ID NO: 40029

SEQ ID NO: 68177 - DNA, 1356 bp, Neisseria meningitidis
atgtctgatttttttcattctgacgtgttgtccgtttccgagttgaacgcatttgccaaaagtattttggaaaaccaccttgccggtttgtggattgccggcgaagtgtccaacctgacccgcgccgccagcggacattattacttctcgcttaaagacagccgcgcgcaggtgcgttgcgcgatgttcaaaggtgcggcggcgcgtttggcgaagcctttgaaagaaggcgaccatatcgaagtatcagggaaaatcagtatttatgaaacgcggggcgaatttcagattaccgtgaacgaagtgcggctcaagggcttggggcagctttacgaagcctacgagcggttgaaggcgcagttgcaggcggaaggcgcgtttgcggcggaacgcaagaaacctttgcccgcccgaccgcaatgtatcggcatcgtaaccagtctggcggcggcggctttgcgcgatgtcgttactaccttgaaacgccgcgcacccgaaatccccgttatcgtttatccgacacccgttcaaggcacaggcagcgagtttcagattgcccaagcgattaaaaccgcatcgcaacgcgccgaatgcgacgtgttgattgtctgtcgcggcggcggcagcattgaagatttgtgggcgtttaacgaagaaccggtcgtacgcgccattgaagcctgcacgattccggtcgtcagcggcgtaggccacgaaaccgatttcacgcttgccgattttgttgccgacgtacgcgcaccgacaccgaccggtgcggcggagctggtcagccccaaccgccaagaatcgctacatcgtctcgctcaggcgcaaggccgtctgaaaaccgttttggaacaacgctatttcgatgccagccaaaaactcgactggctggcgcggcaaatccgtcatccgcgccaaaaactcgacgaacagcgcacctacatccacaaactggcgcaaacgctgtcttactcgatgacgcaaaacctccgcgcccacgccgcccgtttcgaacgccaaacccaagccctgcaacattaccgtcctgatatttccgtttaccggcaagacatcgaccgctttcagacgaccttgtcgcacgccttccgccaactgctcgcccggcaccgccaaagtcttgctgcccaagcctccctgctcgaagccgtttcgccgcagcacattctggaacgcggcttttccgttgtcaaaaacacacgcggacaagtcatccgcaacgccgatgttttgaagcaggggcagaagctgcacattatcttcgccgacggcgaaaccgacgtgcgcgtaagcaaagaacaagggcagcaggatttgttcgattgcatttaa

SEQ ID NO: 68178 - DNA, 354 bp, Neisseria meningitidis; identical to SEQ ID NO: 60208

SEQ ID NO: 68179 - DNA, 651 bp, Neisseria meningitidis; identical to SEQ ID NO: 43953

SEQ ID NO: 68180 - DNA, 696 bp, Neisseria meningitidis
  misc_feature 4, 5, 6, 7, 8: 'n' is a, c, g or t
gtgnnnnntccgtattatgtacaggcggatttagcctacgccgccgaacgtattacccacgattatccgaaaccaaccggtacagacaaagacaaaataagcacagtaagcgattatttcagaaacatccgtgcgcattccatccacccccgagtgtcagtcggctacgatttcggcgactggaggatagcggcagattgtgccagttacagaaaatggaacaacaataaatattccgtaaacacaaaagagttggaaaacaagaataacaataagagagacctgaagacggaaaatcaggaaaacggcagcttccacgccgcttcttctctcggcttatccgccatttacgatttcaaactcaacgataaattcaaaccctatatcggtgcgcgcgtcgcctacggacacgtcagacacagcatcgattcgaccaaaaaaacaacagaggttcttacctcctcccatgctcctggcacagcacctacgatttataatcagggaagtacgcaaaacgcctatcacgaaagccacagcatccgccgcttaggtcttggtgtcatcgccggtgtcggtttcgacatcacacccaagctgaccttggacaccggataccgctaccacaactggggacgcttggaaaacacccgcttcaaaacccacgaagtctcattgggcatgcgctaccacttctga

SEQ ID NO: 68181 - DNA, 1058 bp, Neisseria meningitidis
atgatgataggggcttctttgttttcgagtgcagggattgcagaaacctacttgcataatgcgggtattaagattatagctgcaaatgaattggtgccagaacgtgctaatttatataaagctctatatcccgaaagtaaaatgattataggtgatatacttcatgaggaagtgtttcaaaatttaatacagagcgtgccgaatcgattagattttttaattgcttctcctccttgtcaaggcatgagtgttgcagggaaaaatcgtaacattcaagagatggctaatgataaacgtaatcatttaatattcagagtaatcgaatttattttattaaaacgcccaacttttgttttgattgaaaatgttccatttttttaaaaattaagttaccttataaggggacattacaaacagtagaagtaattttgcaagatttatttggttgcgaatattatattcaaactcatatttttgattctgccgattatggtgttgcacaacatcgtaaacgagctattattcgtatgaataaacattcaactatttggggaatgccggaaaaagttacaaaaaccatttctgttcgtgatgctattagttttttgcctagtattgagtctggacaaaagtctaatgtgaaatggcattttgcacgtacacatgctccggagcacattatatggctaaaaaatacgccaacaggacgatctgcttttgataatatagaacattatccaaagaaaaaaaatggtgaaaaaattaaaagttataatacaacttatcgccgtatggagtgggatgctcctgccccaactattactattcgtaatgacgctatcagttcacaattaaatgttcatcctggacggtctatgcctgatggaacatattcagatgcaagagttttaacaccattagagttaatgcttttaacatcattacctattgattggaatattcccgacgatacatcagaattattaattcggcaatgtattggtgaatctattcctccattgttaattaaaaaaattgtagagagaataggaaaatag

SEQ ID NO: 68182 - DNA, 285 bp, Neisseria meningitidis
atgaaattgttggccgcattgattccgctcttgatgagcgtcgtaggccgtatattgactgcattgggattgatggccgtgacctattcgggggtggatagattggtagcccattttcaacaggcgataacccatagcataacgggcgcacctcaagcaatgttacagcttttctatataagcggcggtggtactgttctaaacattcttttcggcgcgatcgcctttattctgtcattcaaacaaatgacaaaactagcaacctcaatcgggaagaaaaaataa

SEQ ID NO: 68183 - DNA, 246 bp, Neisseria meningitidis; identical to SEQ ID NO: 44944

SEQ ID NO: 68184 - DNA, 111 bp, Neisseria meningitidis; identical to SEQ ID NO: 40033

SEQ ID NO: 68185 - DNA, 411 bp, Neisseria meningitidis
ttgacagaagaaatgatgaaaaagcagcggcatatcctgtgtgtcggctgcctgtatattatattgaaggtcaacgtatttcccaataccggctggatggaagcgtcgaaagggatgcagggcatgtcgttcagtaccttcggatacgcggatgctccgggctatacattcagccacattggccatactttaattttcctacttggaaagaccacagggacacgtacaactgtttccgatagttcgcataatgtatattatgttaaattatatatttgtgcaaataactccaaggcattaagctgttgtttgatgctttgccagtttgggagaaagttgtccatatgcgccataaaacgggcgttgcgatggcgttcgagcaaatgggtcagttcgtggacgacgacgtat

SEQ ID NO: 68186 - DNA, 2143 bp, Neisseria meningitidis
atggcttggtgggaatttaggggattttggggaattttgcaaaggtctcgggcagttttacacgcctgccgaagtctcccgcattatggcgaagattatcggaatcagcgcagattgccgtccagcaccagcgtttatgacccgacctgcggctcgggttcgctgttgctcaaagccgccgcccaagccggcagccaaatcagcctttacggtcaggaaaaagatgtggcaaccgcgtcccttgcccgtatgaatatgattttgcacaacaacgaaaccgccgaaatcaacaccgggaacaccttgtccgattcgtctttccgtgatgaaaacgacgggcttaagaccttcgattttgccgttgccaatccgccttatcccgcccgaaaaaaacggcgattacgcctttttgctgcatctgctcaaaagcctgaaaccaagcggcaaaggtgcgattattcttccgcacggtgtgctgtttcgcggcaatgccgaagcgcgtattcgcacggaattgcttaaccttgaccttattaaaggcattatcgggctgcctgccaacctgttttacggcacgggcattcctgcctgcatcatcgtcatcgacaaagaacacgcccaaaccgcccaatttgccgaagagggaacaaaccaagttatcagtggcggcagcgtgtttatgattgacgcatcgcgcggcttcattaaagacggcaacaaaaaccgtctgcgtgagcaagacattcacaaaatcatcgacactttcacaaacctcgttacagccgtatggtgcatttaagcgaaatcgcagcacaagattacaaccttaatctgcctcgctatatcgacagcggagaagtcgaagacctgcaaaatctcgccgcctatctttatggcggcatacctgcgcacgatatggacgcattggaagcctattggcaagttttaggccgtatgaaaaacgagttgtttgccgaacacgatggacgctttaccactatacaacggaatcgattgcaaatctttcccactgttcttgaaagaatgcgaatttcgatttaacttcggcacaccgtctcaacagcttaaaatcctgcgggattggtgtggaatttagggctaatctagtacagccccaaatttaatccactataaaatcgaaagcagccaaatcaaagcccatatattggcgcaccccgattacgccgccttcaaagccggacacctggcaaagtttgccgcgtggcacactcaaaacgaccttgccgtcatccaaccgggcagccggccgggcaggcttatccggaaatggagcgaaagcctgctggacgcgttcaaacccggcagcctgattgaagaatacgatttctaccaaatcctgacggactactgggcggaaaccctgcaagacgatgtttatctcatcgcccaagatggctggaaggcggttaaaaacctagccgaaatcaccaaagaaagcgatgaagccgcgaacctgaccgtcgtctttgaggaaaccgaaaccgacaaaaaaggcaaagccaaaaccaagcgcatcagcaaaaaataccgcagcgaagtcatcgcccccgagctggttgcccgccgctacttttcagacggcatcgccaagctggaagaaaaacaaagcgagctggaacgcctaagccaagaattggaaaaccacatagaagaacacggcggcgaagagggtgcgctgaacgacgtattggatgcaaaaggcaaactttccgccaaacttctgaaaaccgcattggaagaaagcggcatagaagaaggcgaacgggctgttttacaaaccacccaaacactgatgacgcaggaaaaagccgcgaaagacgcagtcaaaacccaaatcgaagccctgaaccttgccgtattcaaacaattcggccgactttccgaagccgaaatcaagcagcttgccgttcaagacaaatggcttgccgatttacaaagccgaatcgaaaatcgcttggaaaacagtattcagcagcttatcagccgcttgaacacgctggaagaccgctaccgcagcccgatggccgagcttgcccgagaagtggaaaagtggcaaagcaaagtcaatgcccaccttgaaaatatgggttttggaggctga

SEQ ID NO: 68187 - DNA, 315 bp, Neisseria meningitidis
atggcaaaccgatttcggcgacgcaaatccgcataccgccgccttagcggcaagccgttgttttcagacggcattacgggcaacctttgcggcgggcgaaaaaccttgtcctataatttatcccgtttcaaaatcagcatacggtcggaaatgcaaaaaatatctttcaatttgttgaagcctgcaaactccccgaaaatagggaaacgccgcccctgtttgaacggcgcgccgcatattccgatgccctccccccgataccttccggcaagcccagaaatacccggcaacaatatccatccggcaaaaatctga

SEQ ID NO: 68188 - DNA, 1224 bp, Neisseria meningitidis
gtgggacgcagaaaactttggtttgccctggcagcagcaggcgttatcggcggtttggtcggcattgtgctgacggaactgatgcacttcatacagcatacggcatacggttatggcgcggacggtgcgtacatctcgttccgcgaaggtgtggcccgtgcttcggaagggcggcgtttaggcgtattgattctgtgcggtatgttggcaggcggcggctggtggttgctcaaacgtttcggtaagccgcaaatcgaaatcaaagccgccttgaagcagccgttgcaggggctgccgtttctgacgacggttttccatgttctgctgcaaatcataacggtcggactcggttcaccgctcggacgggaagtcgccccgcgtgaaatgactgccgcgttcgcttttgccggcggcaggcggttgggtttggatgaagacgaaatgcggctgctgattgcttgcgcttcgggtgcgggtttggcggccgtgtataacgtgccgctcgcctccacactttttatcctcgaagccatgctgggcgtgtggacgcagcaagccgtcgccgccgcattgctgacttccgtcatcgccaccgccgtcgcgcgcatcggcttaggcgacgtgcagcaatatcatccggctaaccttaccgtcagcacctcattactttggttttccgccgtcatcggcccgatactgggcgcaaccgccgtctttttccagcgcacagcccaaaagtttccctttatcaagcgcgacaatattagaatcattctcttggcagtctgcatgtttgcgctcatcggcgtgatttccgtttggtttcccgaagttttgggcaacggcaaagcaggcaaccaactgacttttagtggtttgaccggttggcaatacgctttggaacttgccgccgtcaaatggccggtcgtcttgatggcgctggcggcaggcgcatacggcggactgattacgccgtcgatgatgcttggcagcaccgtttcttttgctgccgccgccgcgtggaacagtgttttccccgcaatgccgtctgaaagcgcggcagtcgtcggagcggcggtgtttctcggcgtatcgctcaaaatgccgctgaccgccattgtgttcgtattagaactgacctacgcgccgctgtccctgctgctgcctttgtgcatcggcatggcgggggcattgggaacatcgggaaaaatgggcttcaaataa

SEQ ID NO: 68189 - DNA, 1149 bp, Neisseria meningitidis
atgagcatccatctcgacttcggcattagtcctaaaacgttccgacagacttatctgtatcaaaagcccaagctctttaaaggagcggttcggaatctcgaagccgcatcttggaaagatatcaacgagatataccaacgagcagacccaaccgcaccgctgtttcatctgcgtaaaaaaggtgcaattgttcctaaagaagaatacgtcgaaagtttcgacgatttgggcaaaactcgctaccgttttattaaatccgttatctacgaacatatgaagaatggtgcgtcgttgcgctataaccatattatagtggattaaatttaaaccagtacagcgttgcctcgccttgccggcgcacatactattgttagtggatatcttgcttttggcagcgacgaatcttataaaaaccattgggacacccgcgatgtgtatgccatccagcttttcggcaagaaacgttggcaacttactgcccctgatttccctatgccattgtatatgcaacagactaaagatactgatatttccattcctgaacatatcgatatggatattatccttgaagcaggtgatgtcctctacatcccgcgcggttggtggcacagacctatcccgctcggctgtgaaaccttccacctcgctgtcggtacctttccacccaacggctataattacctcgagtggctaatgaagaaattccccacgatagaaagtctgcgccacagtttctcagactgggagcaagataggacgcgtatcaacgatactgccgcacaaattgctgccatgattgccgaccccgtcaattacgaagccttcagtgaagacttcctcggcaaagaacgcaccgataccgcttttcatctcgaacagttcgcgaatcccaacgctattccgctttcagacgacgtcaggttgagactaaatgccaataatttggatacgttggaaaagggatatttgattgggaatgggatgaagataagcgtagatgagttggggaaaaaagtgttagaacatatcggtaagaatgaaccgttattgttgaaaaatctactggttaacttcaatcagggaaaacatgaagaagttaggaagttgatttatcagttgatagagttagattttctggaacttttgtga

SEQ ID NO: 68190 - DNA, 369 bp, Neisseria meningitidis
ttgaataatattcctgttgaaatccgtttgttgaaaaaccgtaccgtgttggttttgacttatggggacgaacctaaaaatctgcctgccgaatttttacgcgtctattcgccgagtgcggaagtgcgcggacacggcgtgggacaggatgttttgcagaccggcaaggcggatgtccaaatcacggatttgcagcctgtcggacagtatgcgctgaaaatcagtttttcggacgggcacgacagcggtctttacgattgggcgtatctgcacagactggcatacggatacgatgcgatgtggcaggaatatttggacaaattggcggcggctggtgcgtcgcgttttgaaaagcaatcagattgttaa

SEQ ID NO: 68191 - DNA, 4296 bp, Neisseria meningitidis
atgaaaacaaccgacaaacggacaaccgaaacacaccgcaaagccccgaaaaccggtcgcatccgcttctcgcctgcttacttagccatatgcctgtcgttcggcattcttccccaagcctgggcgggacacacttatttcggcatcaactaccaatactatcgcgactttgccgaaaataaaggcaagtttgcagtcggggcgaaagatattgaggtttacaacaaaaaaggggagttggtcggcaaatcaatgacaaaagccccgatgattgatttttctgtggtgtcgcgtaacggcgtggcggcattggtgggcgatcaatatattgtgagcgtggcacataacggcggctataacaacgttgattttggtgcggagggaagcaatcccgatcagcaccgcttttcttaccaaattgtgaaaagaaataattatcaaaaggatacaaagcattactatcacgaggattatcataatcctagattaaataaatttgttactgatgccgctccagtagaaatgaccattaatatgaatggtaatacttatggaaatataactgactatcccgatcgtgtgcgtattggatcagggcgacaatattggcataaaaaaaatggtaaccctcaacaaatctttggtagttatagttaccgaattgctggtaatacccataatcaagtgggaggaagtgatggacacgttagtttaaatggggacgtaaaaaaaccaaacaactatggccctcttcctacgggtgtttcatttggagatagtggttctccaatgtttatttatgatgcaaaaaaacaaaaatggctaatcaatggtgtattaagagaaggtaatccataccaaggaacacacaatggctatccaattgtacgtaaagcctatttaacaaaaatccaagatggagatactggagcgagtatttatgatatggtgggtggggcttcttatctgtgggaagctaaagaattaggaaaaagcactattagccaagaaaataatccaaaattttctcaaatgtcagatattgctaatcctagcttgcctaagcaaaacaaatataccccatcgttagatcacagaaaacacattacttttggagaatatgttgaaggcggagttggtaaacttactttgaaatcaaatattgatcaaggtgcaggcggtttgtattttgagggagattttatagtttcgcctacccaaaatgaaacatggaaaggggcgggtatatctatcagtgatgaaagtaccataatttggaaagtcaatggcgtggcaaacgaccgcctgtccaaaatcggcaaaggcacgctgcacgttcaagccaaaggggaaaaccaaggctcgatcagcgtgggcgacggtaaagttattttagatcaacaagcagatgaaaataataaaaaacaagcctttagtgaaatcggcttggtcagcggcagggggacggtgcaactgaatgccgataatcagttcaaccccgacaaactctatttcggctttcgcggcggacgtttggatttgaacgggcattcgctttcgttccaccgtattcaaaataccgatgaaggggcgatgattgtcaaccacaatcaagacaaagaatccaccgttaccattacaggcaataaagatattgctacaaccggcaataacaacagcttggatagcaaaaaagaaattgcctacaacggttggtttggcgagaaagatacgaccaaaacgaacgggcggctcaaccttgtttaccagcccgccgcagaagaccgcaccctgctgctttccggcggaacaaatttaaacggtaacatcacgcaaacaaacggcaaactgtttttcagcggcagaccgacaccgcacgcctacaatcatttaggaagcgggtggtcaaaaatggaaggtatcccacaaggagaaatcgtgtgggacaacgactggatcaaccgcacgtttaaagcggaaaatttccatattcagggcgggcaggcggtgatttcccgcaatgttgccaaagtggaaggcgattggcatttgagcaatcacgcccaagcagtttttggtgtcgcaccgcatcaaagccacacaatctgtacacgttcggactggacgggtctgacaaattgtgtcgaaaaaaccattaccgacgataaagtgattgcttcattgactaagaccgacatcagcggcaatgtcagccttgccgatcacgctcatttaaatctcacagggcttgccacactcaacggcaatcttagtgcaaatggcgatacacgttatacagtcagccacaacgccacccaaaacggcgaccttagcctcgtgggcaatgcccaagcaacatttaatcaagccacattaaacggcaacacatcggcttcgggcaatgcttcatttaatctaagcaacaacgccgtacaaaacggcagtctgacgctttccggcaacgctaaggcaaacgtaagccattccgcactcaacggtaatgtctccctagccgataaggcagtattccattttgaaagcagccgctttaccggacaaatcagcggcagcaaggatacggcattacacttaaaagacagcgaatggacgctgccgtcaggcacggaattaggcaatttaaaccttgacaacgccaccattacactcaattccgcctatcgccacgatgctgcaggcgcgcaaaccggcagtgtgtcagacacgccgcgccgccgttcgcgccgttccctattatccgttacaccgccaacttcggtagaatcccgtttcaacacgctgacggtaaacggcaaattgaacggtcagggaacattccgctttatgtcggaactcttcggctaccgaagcgacaaattgaagctggcggaaagttccgaaggcacttacaccttggcggtcaacaataccggcaacgaacccgtaagcctcgatcaattgacggtagtggaagggaaagacaacaaaccgctgtccgaaaaccttaatttcaccctgcaaaacgaacacgtcgatgccggcgcgtggcgttaccaactcatccgcaaagacggcgagttccgcctgcataatccggtcaaagaacaagagctttccgacaaactcggcaaggcagaagccaaaaaacaggcgggaaaagacaacgcgcaaagccttgacgcgctgattgcggccgggcgcgatgccgtcgaaaagacagaaagcgttgccgaaccggcccggcaggcaggcggggaaaatgtcggcattatgcaggcggaggaagagaaaaaacgggtgcaggcggataaagacaccgccttggcgaaacagcgcgaagcggaaacccggccggctaccaccgccttcccccgcgcccgccgcgcccgccgggatttgccgcaaccgcagccccaaccgcaaccccaaccgcagcgcgacctgatcagccgttatgccaatagcggtttgagtgaattttccgccacgctcaacagcgttttcgccgtacaggacgaattagaccgcgtatttgccgaagaccgccgcaacgccgtttggacaagcggcatccgggacaccaaacactaccgttcgcaagatttccgcgcctaccgccaacaaaccgacctgcgccaaatcggtatgcagaaaaacctcggcagcgggcgcgtcggcatcctgttttcgcacaaccggaccgaaaacaccttcgacgacggcatcggcaactcggcacggcttgcccacggcgccgttttcgggcaatacggcatcggcaggttcgacatcggcatcagcacgggcgcgggttttagcagcggcagtctttcagacggcatcggaagcaaaatccgccgccgcgtgctgcattacggcattcaggcacgataccgcgccggtttcggcggattcggcatcgaaccgcacatcggcgcaacgcgctatttcgtccaaaaagcggattaccgctacgaaaacgtcaatatcgccacccccggccttgcgttcaaccgctaccgcgcgggcattaaggcagattattcattcaaaccggcgcaacacatttccatcacgccttatttgagcctgtcctataccgatgccgcttcgggcaaagtccgaacgcgcgtcaataccgccgtattggctcaggatttcggcaaaacccgcagtgcggaatggggcgtaaacgccgaaatcaaaggtttcacgctgtccctccacgctgccgccgccaaaggcccgcaactggaagcgcaacacagcgcgggcatcaaattaggctaccgctggtaa

SEQ ID NO: 68192 - DNA, 1143 bp, Neisseria meningitidis
atgcagaaatggcaaaccgagctttattccacaccgctttggctttgcctgacaccgaaaagcacggtcaaagtcttgctgctgattacggcaatgattacgctggtgttaaccgaaatgcggctgaatgtgttgagtacctttatgtccaaaggactttacgactcgatgcaggatttaaatgcttcggcattttggatgtttgccgcaatgaacgcgggcgtggtgctgatacgggcgtttaacaacgtcgtcaacgacttcctcaatcaaggcttggcgattaaatggtcggagcggctcaacgaagtgctgacagcacgctggcttgccgacaaaaactactaccgcctgcaaatgcgccgccacgcgccggacaacatcgaccagcgtatccaacaggacgcgcaggaatttatcgcttcgaccatcgaatttgtgcgcggcatggtcaattcggtcgttacttctctggaatttgccgttgttttgcggggcttggctggcatcctgaccgtgttcggcttcgacattccgcacggcatcgtttggtttgtctatatatttgtgattttggcgacctttatcgccatgtggataggcaaccctttgattcgttacaattatgaaaacgaaaaactcaacggcgactaccgttattccctcatccgcgtgcgcgaccacgccgaaagcgtggcgttttacaacggcgaaaaacatgaatacgaccagctttccgaccgctttaaagccattatccgcaaccgttggcgcattgcgcggcaaagcgtctgcttaagcggctttaacgatatgttcatcaacggcatcaaactcttcccgattattttgcaagctccgcgcctgtttgccggacaaatcaaaatcggcgacatccagcaaaccgtccaagccttcgcgcgactgcaaaacgcgctttctttctttcgaatgttctacaacaaattcaccgcctaccgcgcccgattggagcgtctgtacggctttttgctgagtaccgaagaacaacacagcgcgcggcaacccgagattagcgaagtttcagacggcattgcactggaatgtaaggcggcggcagcttttgcacgaattggcggcagcttttgcaccgccgaagcgtag

SEQ ID NO: 68193 - DNA, 561 bp, Neisseria meningitidis
atgaatccacttattcatcaagcaaaggaatcatctatgcaaacccgcatcctctccgcagtactgctggctttttcaaccgctgcctttgccgagggcgcattcacgctgcaattcgacaacccgtccgaagacggcggcttcacgcaaaaccagattttgagcgcgccttacggctttggctgttcgggcggcaatgcttcgcccgcgctgtcatggaaaaatccgcccgcagggacaaaaagtttcgtcctgaccgtttacgataaagacgcgccgaccggtctgggctggatgcattgggtggtcgccgacatccccgccgatgtccgccgccgcaacgcggcctcgctgcaattaagccgctgcgccagcatcgccgacgaccagtccgcagccatatcggcggtaatcagtttgcggatttgccgcatcaggttgacgccttcgtacacggcaaaaccgatgccgtcatgctgcaaccacgccaacacgccgcaaagcgcggcctccgcagcattgtgcggcacttcttcatccgccagtaccgcagcctcataa

SEQ ID NO: 68194 - DNA, 612 bp, Neisseria meningitidis; identical to SEQ ID NO: 40039

SEQ ID NO: 68195 - DNA, 2424 bp, Neisseria meningitidis
atgtcggcacaaaccgatcctggctacttcttcatgcccaaccacattatcctgataggcgcgagcgaacgtccgtacagcctgggcgaacgcgtactcagcaacctgctgagtacgccctttcaaggaaaaatcacccccgtaaacccgcgccaccacaccatagccgggcttcccgcctacaccagcctcaacaaaatccccggcaatgcagacctgattattgccgttaccctacccgacagttacgacaccctcttcaaaacctgccgcaaaaagcagctccgacacatcatcctcatacaggactgggacagcctgtctgccgcagaactgcacaccgccgaaactgccatccgcaaacaccacggcaacggactcaacatcaccgcctgcaccaccgcaggcatccaactgccctcactcggacttaacatcagtacccaagacggatacgccgcaggccataccgccatactgaccggcaatgccgccgtcagccgccaaatcgacaacatcctgaacaaactccgtcaaggcacatcccgccacatcagcctgcatcccggcatcagccccatcacatccgccgattggctcaaccgcttcggacacagcctgcacaccaaaaccgccgtcctacaccacaaccctgaagaggatcagcgcaaactgttcagcgcaatccgccaatttacccgccatacgccgctgattctccacatcacctgccgcacgacagaaaccgaccgtgccgtactgcactgcctcgcccgacactgcaacttcctcatcagtttcaacgccgacgacctcgaagccgcactgcgcgcccaactgtccgaccttccacccctgtcccgactcgacatcctgtccgacacgcctgccgaatggctgaacgcgcacgcgccaaaaaccctcgccctccactttcccaaccttccccaccacatccgcaacggacacctgaccggcacacccacaccctcaatctgccacgacatcgcctcacgtcagcttgcccgccccgacacccaagccgtcctgaccatcctcagcccctccggacacgaggattacaaaaaaacagcacgcgcccttatccgcctgtccgaacagaccgccaaacccctgctcgtcagcagccccttttcagacggcataacacatttcgacacccccactcaggcaatccgcaccctttcctaccgcaacaccgccgccgccctgaaacaggcacagctcgacattgcaccgccgcaaccgtgccgtctgaaaacaccgcaaccccaaaacatcaaaaaagccctcgaagccgccgaccccgccctaatcgccgaagccctgcatcccccctaccggcacaccacccataacgccgtccaattccaattcggcagccactccctctatggcgacatcctgaccgcacgttgcaacggacaaaccactgccgtactcccgccgtttaccacgctcgacagccgccaccttgcccgctttgccgaactcgacggcacacaaaccctcgaccagttcctgcacacactgaccatcattcccgaataccgccaacacattctcggcatcaccctcaacctaaacggcggacaatacagcagcgatttcatcttaaagacacccgaaacacacgacacgcccaaacgcaagaacacaggcaaagccgcccaaaccctcgaacatgccgccgcaaaaatgcagagtgccgccgcatacctgaaacacaaaaacccgacagccgccgaatttctccgccacacaagcgaagccgccgcagaactgctcggcagcaaaaccgaaaccggagcagccgtacccaacgtacttgccccctatcccgcagcataccccaaaacactgtccctaagaaacaacacgaccgttaccattacccccattttgcccgaagacgcagaagccaaacagcagttcgtccgcagcctcggtcccgaagcacggtacacacgcttcatgacccacaccaacgaactgcccgcagccacgttggcacgcctgtgcaaccccgattaccactgtgaagccgcatggacggcaaaggatgccgacagcaacatcgtcgccgtcgtccgccacagccgcctgaaccgcaacgaatgcgaatttggcatcacactggcggaacatatgcgcggcagcggactggcacagaaaatgatggaactcatcatccaaaccgccgcacagcaaggctaccggactatgagtgccgacattctcaaaaccaatacccccatgatcaaacttgctgaaaaatcaggatttaccctcaaggaatcggacaccgaaaaaaacctgtaccgcgcatatctgaaccttgcggcagacaaaacaacagaaaaaacaaataaaaacttgcgcaccgaccacaaaataacctaa

SEQ ID NO: 68196 - DNA, 1269 bp, Neisseria meningitidis
atgcaacagattaaatttattgacttattttccgggatgagcggtatcaggaaaggatttgaacaagcctgtcggaaacagtcggttgcttgcgaatgtgtttttacctcagaaatcaaaccggcagctttggaagtattgaagcaaaactaccctgatgaagtgccgtatggagatataacgaaaattgaaacgggagatattcccgattttgacatcttgttggcaggcttcccttgccaggctttttctttcgccggaaaaagattgggctttgaagatacgcggggaacgcttttctttgatgtggcaaggattttaaaggcaaaaaaaccaaaaggttttattttggaaaatgtggaaggattggtgacgcacgatagaaaagatccgacacaaaaatgacgcaccctgaccgttattttggaaaccttggaaacattgggctactatgtttcttggaaagttttaaatgcaaaagatttcggcattccccaaaacaggaagcgcatttatctgacaggcagtttgaaatccaaacccgacttatcttttgaaacaaccctaagtccgaaattaaaaaatattttggaatcgggactgcctaccgaaagcagtcctttcatcaaaaaattgctaaagaaatttcccccgtccgaactgtacggaaaatcagtaaaggacaaacggggagggaaaaacaatatccacagttgggatattgaattaaaaggcacagtaaccgaagaagagaagcaattattaaatatgcttctaaaagaacggaggaagaaaaaatgggcttcagaaatcggcatcgattggatggatgggatgcctttgacaaaagcgcaaatttcaactttctataaacaccccaatcttcaaaatattttggacagcctgacagataaaggctatttggttttggagcatccgaaacaaaaaattggcgggcgaagaatcaaagatgaatccctgcccaaaggctacaatattgtttcaggaaaaaaatcatttgaaatcaataaaatattagacccaaatgatgttgcgccaaccttagttgcaatggatatggagcaccttttcgtcgttgacaacggcggtttgcgcacacttaccggaaaagaaggtttacgcttattcggctatccggacgattattcgtttgatattcctaaaaaagacaaatacgatttattgggcaataccgttgccgttcctgtgattaaggcggtatctgaaaggcttctgcatactttataa

SEQ ID NO: 68197 - DNA, 1002 bp, Neisseria meningitidis; identical to SEQ ID NO: 48001

SEQ ID NO: 68198 - DNA, 768 bp, Neisseria meningitidis
atgagaccatatgctactaccatttatcaactttttattttgtttattgggagtgtttttactatgacctcatgtgaacctgttaatgaacaaaccagtttcaacaatcccgagccaatgacaggatttgaacatacggttacatttgattttcagggcaccaaaatggttatcccttatggctatcttgcacggtatacgcaagacaatgccacaaaatggctttccgacacgcccgggcaggatgcttactccattaatttgatagagattagcgtctattacaaaaacgaccaaggctgggtgctcgagccatacaaccagcagaacaaagcgcactttatccaatttctacgcgatggtttggatagcgtggacgatattgttatccgaaaagatgcgtgtagtttaagcacgactatgggagaaagattgcttacttacggggttaaaatgccatctgcctatcctgaatacgaggcttatgaagataaaagacatattcctgaaaatccatattttcatgaattttactatattaaaaaaggagaaaatccggcgattattactcattggaataatcgagtaaaccaggctgaagaagataattatagcactagcgtaggttcctgtattaacggtttcacggtacagtattacccgtttattcgggaaaagcagcagctcacacagcaggagttggtaggttatcaccaacaagtagagcaattggtacagagttttgtaaacaattcaagtaaaaaataa

SEQ ID NO: 68199 - DNA, 2262 bp, Neisseria meningitidis
atgcttgcacccgaattggaacagattttgcagcagctttaccgcgaggcgcgtaaggctcattatgaatttatcagcctcgagcatctgcttttggtactcatcgaagaagatgcctccgtgccgaacgtcttaaaactatgcggcgcggatttaaaagtggtgtccgaacagctcgccgccagcgttgccgaaaacacccccctgattcccgaacaccttttagacacggtcgaaacacggcccacgctcggcttccaacgcgtgatgcaacgggcgatggtgcatacccagtctgccggaaaagccgcagtcgaaccgttggacgttttggtcgcgctgatgagcgaaaccgacagccacaccgtctatttcctcaagctgcaatcggttacgcgttttgaagttttgcgctgtattgcccacggctcgcccgatgacgaggatggcaatgattcagacggcctgggacgcgagggcgaagaagcggaacaaaaaaccggctccctttccgactacaccgtcaacctcaacaccgaagtcaaagccggccgtatcgaccctttgattggtcgcaaacacgaaatggaacggctggtgcaaatcctatgccgccgccgcaaaaacaatccgcttttggtcggcgaagcaggcgtgggcaaaaccgcgctggcggaaggtttggcacatcaaatcgtcaacggcggcattccagacgcgcttaaagatgccgaagtgtacgcgctggatatgggctcgctgttggcgggcacgaaataccgtggcgactttgaagcgcgggtcaaatccgtcttgaaacagctcgaaaaaatcccgcacgccattttgtttatcgacgaaatccacaccatcatcggcgcaggcagcaccagcggcggcaccatggacgcgtccaacctgctcaaacccgcgctggcaaaaggttcgctgcgctgcatcggcgcgaccacttacgacgaataccgcaccattttcgacaaagaccatgccttaagccgccgcttccaaaaaatcgacgtggtcgaacccaccgtttccgaaaccgtacaaatcctgcgcggcttgaagccgatgtttgaagccttccaccaagtccgctatacgcaaggcgcactcgaagccgccgccgaactctccgcacgctacatcaacgagcgtttcctgcccgacaaagccatcgacgtgatggacgaagcaggcgcggcgcaacggattctgcccaaatccaaacagaaaaaagtcatcggcaaagcgcaaatcgaaaccgtcatcgccaaagtcgcgcggattccagaaaaaaccgtgtcgcacgacgacaaacaggtgctgcaattcctcggccgcgatttgaaaaacatggtttacggtcaagaaaacgccatcgacgcgctggttgccgccgtcaaaatgtcgcgttcgggcttgggactgcccgacaaaccgataggcagcttcctcttctccggcccgaccggcgtgggcaaaaccgaagccgccaaacagcttgcctactcgatgggcgtaccgctgcaacgctttgatatgtccgaatacatggaacgccatgccgtatcgcgcctcatcggcgcgccaccgggctacgtcggctttgaacaaggcggccttttgaccgaagccgtcaacaaacagccgcattgcgtattgctcttggacgaaatcgaaaaagcccaccccgacattttcaacgtcctcctgcaagtcatggacgcaggcaaactgaccgacaacaacggcaagagtgccgatttccgcaacgtcatcctgattatgaccaccaacgcaggcgcggaaagcctcagccgccccagcctcggctttaccgccaagcgcgaacgcggcgacgaaatgcaggcaatcaacaagctcttcacgcccgagttccgcaaccgcttggacgcgattatcccgtttgcacccttgtccgaacccatcatcgtcaaagtcgtggacaaattcctgctccagctcgaacaccagctcctcgacaaaaaagtcgaagccgaattcacgtcggcattgcacaaatatctggcggaaaaaggtttcgacccgcaaatgggcgcgcgcccgatgcaccgcctgattcaggaaaaaatccgcaaaccgctcgccgacgaactcctgttcggcaaactatccaacggcggcttcgtgcggatagactgggatgcggcaaaagaagaagccgtgttgaagtttaagaaaagcaaggtcaaaata

SEQ ID NO: 68200 - DNA, 867 bp, Neisseria meningitidis
atgtccgcaaacgaatacgcacaaatcggctggataggcttagggcaaatgggtctgcctatggtaacgcggctcttggacggcggcatcgaagtcggcgtatacaaccgctctcccgacaaaactgcccccatctccgccaaaggcgcaaaagtttacggcaacaccgccgaactcgtccgcgactatcccgtcattttcctgatggtttccgactatgccgccgtgtgcgacatcctgaacggagtccgcgacggattggccggcaaaatcatcgtcaacatgagcaccatctccccgaccgaaaacctcgccgtcaaagcacttgtcgaagccgcaggcggacagtttgccgaagcacccgtttccggatcggtcgggcccgccaccaacggcacgctgctgattctgttcggcggcagcgaagccgttttaaacccgctgcaaaaaatattttccctcgtcggcaaaaaactccatttcggcgatgtcggcaaaggttcgggcgcgaaactcgtcttgaactcgctcttgggcattttcggcgaagcgtacagcgaagcgatgctgatggcgcggcagttcggcatcgataccgacaccatcgtcgaagccatcggcggctcggcaatggactcgcccatgttccaaaccaaaaaatccctgtgggcaaaccgcgaattcccacccgccttcgccctcaaacacgcctccaaagacctcaacctcgccgtcaaagagcttgaacaggcaggcaacaccctgcccgccgtcgaaaccgttgctgccagctaccgcaaagcagtcgaagccggctacggcgaacaggacgtttccggcgtttacctgaaactggcagaacactga

SEQ ID NO: 68201 - DNA, 1185 bp, Neisseria meningitidis
atggcagagatctgtttgataaccggcacgcccggttcagggaaaacattaaaaatggtttccatgatggcaaacgatgaaatgtttaagccggatgaaaacggcatacgccgtaaagtatttacgaacatcaaaggcttgaagataccgcacacctacatagaaacggacgcgaaaaagctgccgaaatcgacagatgagcagctttcggcgcatgatatgtacgaatggataaagaagcccgaaaatatcgggtctattgtcattgtagatgaagctcaagacgtatggccggcacgctcggcaggttcaaaaatccctgaaaatgtccaatggctgaatacgcacagacatcagggcattgatatatttgttttgactcaaggctctaagcttctagatcaaaatcttagaacgcttgtacggaaacattaccacatcgcttcaaacaagatgggtatgcgtacgcttttagaatggaaaatatgcgcggacgatcccgtaaaaatggcatcaagcgcattctccagtatctatacactggataaaaaagtttatgacttgtacgaatcagcggaagttcataccgtaaataaggtcaagcggtcaaaatggttttatactctgccagtaataatattgctgattcccgtttttgtcggcctgtcctataaaatgttaagtagttatggaaaaaaggaagaacccgcagcacaagaatcggcggcaacagaacatcaggcagtatttcaggataaaacagaaggcgagccggtaaacaacggtaaccttaccgcagatatgtttgttccgacattgtccgaaaaacccgaaagcaagccgatttataacggtgtaaggcaggtaagaacctttgaatatatagcaggctgtgtagaaggcggaagaaccggatgcacatgctattcgcatcaagggacggcattgaaagaaattacaaaggaaatgtgcaaggattacgcaagaaacggattgccgtttaacccatataaagaagaaagccaagggcgggatgtccagcaaagtgagcagcaccattcggacagaccgcaagttgccacgttgggcggaaagccgtggcaaaatcttatgtatgataattggcaggagcgcggaaaaccgtttgaaggaatcggcgggggcgtggtcggatcggcaaactga

SEQ ID NO: 68202 - DNA, 2282 bp, Neisseria meningitidis
atgaataccaaactgacaaaaatcatttccggtctctttgtcgcaaccgccgcctttcagacagcatcggcaggaaacattacagacatcaaagtttcctccctgcccaacaaacagaaaatcgtcaaagtcagctttgacaaagagattgtcaacccgaccggcttcgtaacctcctcaccggcccgcatcgccttggactttgaacaaaccggcatttccatggatcaacaggtactcgaatatgccgatcccctgttgagcaaaatcagtgccgcacaaaacagcagccgtgcacgtctggttctgaatctgaacaaaccgggccaatacaataccgaagtacgcgggaacaaagtttggatattcattaacgaatcggacgataccgtgtccgcccccgcacgccccgccgtaaaagccgcgcctgccgcaccggcaaaacaacaggctaccgcaccgtctaccaagtccgcagtatccgtatccaaaccctttaccccggcaaaacaacaggctgccgcaccgtttaccgagtccgtagtatccgtatccgcaccgttcagcccggcaaaacaacaggcggcggcatcagcaaaacaacagacggcagcaccagcaaaacaacaggcggcagcaccagcaaaacaaaccaatatcgatttccgcaaagacggcaaaaatgccggcattatcgaattggctgcattgggctttgccgggcagcccgacatcagccaacagcacgaccacatcatcgttacgctgaaaaaccataccctgccgaccacgctccaacgcagtttggatgtggcagactttaaaacaccggttcaaaaggttacgctgaaacgcctcaataacgacacccagctgattatcacaacagccggcaactgggaactcgtcaacaaatccgccgcgcccggatactttactttccaagtcctgccgaaaaaacaaaacctcgagtcaggcggcgtgaacaatgcgcccaaaaccttcacaggccggaaaatctcccttgacttccaagatgtcgaaatccgcaccatcctgcagattttggcaaaagaatccgggatgaacattgttgccagcgactccgtcaacggcaaaatgaccctctccctcaaagacgtaccttgggatcaggctttggatttggttatgcaggcacgcaacctcgatatgcgccagcaagggaacatcgtcaacatcgcgccccgcgacgagctgcttgccaaagacaaagccttcttacaggcggaaaaagacattgccgatctgggcgcgctgtattcacaaaacttccaattgaaatacaaaaatgtggaagaattccgcagcatcctgcgtttggacaatgccgacacgaccggaaaccgcaatacgcttgtcagcggcaggggcagcgtgctgatcgatcccgccaccaataccctgattgttaccgatacccgcagcgtcatcgaaaaattccgcaaactgattgacgaattggacgtacccgcgcaacaagtgatgattgaggcgcgtatcgtcgaagcggcagacggcttctcgcgcgatttgggcgttaaattcggcgcgacaggcaagaaaaagctgaaaaatgatataagcgcattcggctggggggtaaactccggcttcggcggcgacgataaatggggggccgaaaccaaaatcaacctgccgattaccgctgccgcaaacagcatttcgctggtgcgcgcgatttcctccggtgccttgaatttggaattgtccgcatccgaatcgctttcaaaaaccaaaacgcttgccaatccgcgcgtgctgacccaaaaccgcaaagaggccaaaatcgaatccggttacgaaattcctttcaccgtaacctcaatcgcgaacggcggcagcagcacgaacacggaactcaaaaaagccgtcttggggctgaccgttacgccgaacatcacgcccgacggccaaatcattatgaccgtcaaaatcaacaaggactcgcctgcgcaatgtgcctccggtaatcagacgatcctgtgtatttcgaccaaaaacctgaatacgcaggctatggttgaaaacggcggcacattgattgtcggcggtatttatgaagaagacaacggcaatacgctgaccaaagtccccctgttgggcgacatccccgttatcggcaacctctttaaaacacgcgggaaaaaaccgaccgccgcgaactgctgattttcattaccccgaggattatgggtacggccggcaacagcctgcgctat

SEQ ID NO: 68203 - DNA, 543 bp, Neisseria meningitidis
atgaaacactatgccttactcatcagctttttggctctctccgcgtgttcccaaggttctgaggacctaaacgaatggatggcacaaacgcgacgcgaagccaaagcagaaatcatacctttccaagcacctaccctgccggttgcgccggtatacagcccgccgcagcttacagggccgaacgcattcgacttccgccgcatggaaaccgacaaaaaaggggaaaatgcccccgacaccaagcgtattaaagaaacgctggaaaaattcagtttggaaaatatgcgttatgtcggcattttgaagtctggacagaaagtctccggcttcatcgaggctgaaggttatgtctacactgtcggtgtcggcaactatttgggacaaaactacggtagaatcgaaagcattaccgacaacagcatcgtcctgaacgagctaatagaagacagcacgggcaactgggtttcccgtaaagcagaactgctgttgaattcttccgacaaaaacaccgaacaagcggcagcacctgccgcagaacaaaat

SEQ ID NO: 68204 - DNA, 2058 bp, Neisseria meningitidis
atgaagacagacattcaaaccgaattaacccaagccctgctatcacacgaaaaagtatgggcgaacgaagaaaaaaccattttagccaaaaacattctgttggatttggtggaaaaaaccgacccgaccattatcggtttgttattgaataatgatgagttaaaacgccatttctttgtggaagtgaatggtgttttggtgtttaaattgcaggatttacgttttttcttggacaaacacagcgtcaataattcctacacaaaatacgccaaccgcattggtttgacggacggcaaccgctttttgaaagacaattcggatattgtgttggattttccgtttaaagattgcgtattgaatggcggacaaagcaccgaagaaggcgaagagatttattttaaacgcagtaatagccagccagccagccagccagccagccagccagccagccagccaatatacactaaattaacccgaaaaagacaagaaatcttttttaatcaaacccttgcttttgatgaaattgatcggctttttgacgcaaaagcattctcaaaattctctcgctataccgcagacggcaaacaagccgttggcgaaatcaaacgacattcagacggcacacccgccgaaaatctcattatcaaaggcaataatctgcttgccctgcattcgcttgccaagcagtttaaaggcaaagtgaagctgatttatattgacccgccatataacacgggtaatgacggttttaaatacaacgacaaatttaatcattccacttggctgacttttatgaaaaaccgtctagaaatcgccaaagagctgcttatgaaagacggttcgatttttgtgtcaattgacgacaacgaacaggcatatttgaaaattttaatggatgaagttttcggaaatgaaaatttcatctgcaattttatttgggaaaaaaagacaggtgcgtccgatgccaaacagatagcgactattacagagtttgtcttatgttactcaaagaactttaaaacagttaaattaaataaaaacacgttttcttatgatacagagagatacaaattaagtgataagtttgaacaggaaagaggcaaatattatatcgacaatttagatagagggggattgcagtatagtgacagtttgaattttgcaatccaatgtccagatggcacttttacgtatccgaatggcaggactgaatttgtcaatgatggctggatatggaaatggagtaaaaataaaattgattgggcaataacaaacggttttttggagtttagaaaatcaaagtctaaaaaatctgggtggagtgtatgttataaaaactatatgttggttgataacgaaaacaagccgatagaacgttctgctccctataagaacttaatacaggatatcttaaatacacatgcgacagatgaattgaaaaaactgttcggcagcaaagtttttactactccaaaacctgagagcttattgcagtatcttattcaaattgccacatccgaatccgacatcgtcttagactaccatcttggtagtggcacaaccgccgccgttgcccacaaaatgaaccgacaatatatcggtattgaacaaatggattatattgaaacgcttgccgttgaacgcttgaaaaaagtgattgatggcgagcaaggcggtatttccaaagccgtgaattggcaaggtggtggcgagtttgtttatgccgaacttgccccatttaacgaaaccgcaaaacaacaaattttggcttgcgaagattcagacggcatcaaaacgctgtttgaaggtttatgcgaacgctatttcttgaaatacaacgtcagcgtaaatgaatttagtcaaatcattcaagagcctgaatttcaatctttgccattagacgaacaaaaacaaatggtgcttgaaatgttagatttaaatcaaatgtatgtttcattatccgaaatggacgacgagcaatttgcagattgcctgaacgatgacgataaagcggtaagccgtgcgttctatcaagcggagaaaaaaaatggcgaataa

SEQ ID NO: 68205 - DNA, 984 bp, Neisseria meningitidis
atggctgcgtacgacagtttgatggtatttacaggcaatgccaatcccgaattggcacaacgtgttgtcaggcatttggacatttctttgggcaatgcttccgtatccaagttttcagacggcgaagttgccgtcgaactgttggaaaacgtacgcgggcgcgatgttttcatccttcagccgacctgtgcgccgaccaatgacaacctgatggaaatcctgacgatggcggatgcactgaagcgtgcttcggcaggtcgtattaccacagccattccgtatttcggctatgcgcgccaagaccgccgtccgcgttccgtccgcgttccgatttctgccaaactggtggcaaatatgctgtattcggcagggatcgaccgtgttttgactgtcgatttgcatgccgaccagattcaaggtttcttcgatattccggtggacaatatttatgccaccccgattctgttgaacgacatcaaacaacagcggattgaaaatctgaccgtcgtcagcccggacatcggcggtgtcgtccgcgcccgcgccgtggcaaaatccctgaatgccgacttggcaatcatcgacaaacgccgcccgaaagccaatgtggcggaagtcatgaacatcatcggcgatattcaaggcagaacctgtctgattgtggacgatatgattgacactgcaaatacgctgtgcaaagccgccgtcgctctgaaagagcggggggctgaacgtgttctagcctatgccagccacgccgtattctccggagaggcggtcagccgtatcgcctcatccgaaatcgaccaggtggtcgtaaccgataccattcctttgtctgaagcggctaaaaactgcgaccgtatccgtcaggtaacgattgccggtctgttggccgaaaccgtccgccgcatcagcaatgaagaatccgtctcatatcttttcaatgaagaagtgatgacaggcagcatgttgctgccataa

SEQ ID NO: 68206 - DNA, 1544 bp, Neisseria meningitidis
atgatgaccgaaatgcaacaacgcgcccaactgcaccgccaaatttggaaaattgccgacgaagtacgcggcgcggtggatggctgggactttaaacaatacgttctcggcacacttttctaccgctttatcagcgaaaacttcaccgactatatgcaggcaggcgacagcagtattgattacgccgctatgccggacagcatcatcacgcccgaaatcaaagacgatgccgtcaaagttaaaggctatttcatctaccccggccagcttttttgcaatattgccgccgaagcccatcaaaacgaagagctcaacaccaagctgaaagaaatttttaccgcgattgaaagctccgcctccggctatccgtccgaacaggacatcaaaggcctgtttgacgacttcgacaccaccagcagccggctcggcagcactgttgccgacaagaacaaacgccttgccgccgtcctcaaaggcgtggcggaactcgatttcggcaattttgaaaaccaccacatcgaccttttcggcgatgcctacgaatacctgatttccaactacgctgccaacgcaggcaaatccggcggcgaatttttcaccccgcaaagcgtatccaagctgattgcgcggctggcggtgcacggacaggagaaagtcaacaaaatctacgacccagcttgcggctcgggcagtctgctcttgcaggcgaaaaaacagtttgacgagcacatcatcgaagaaggcttcttcgggcaggaaatcaaccacaccacctacaacctcgcccgcatgaacatgttcctgcacaacgtcaattacaaccaattccacatcgaattgggcgacacactgaccaacccaaagctcaaagacagcaaaccctttgatgccatcgtttccaatccgccttattccatcaactggataggcagcgacgaccccaccttaatcaacgacgaccgctttgcccccgcaggcgtacttgccccgaaatccaaagccgattttgccttcatcctgcacgcactgaactacctttccggcagaggccgcgccgccatcgtctcattccccggcattttctatcgcggcggcgcagaacagaaaatccgccaatatctggtggagggcaactacgtggaaaccgtgattgcccttgcgcccaatctcttttacggcaccggcatcgccgtcaatatcctggttttgtccaaacacaaagacaataccgacatccaattcatcgacgcaagcggcttctttaaaaaagaaaccaacaacaacgtcttaatcgaagaacacattgctgaaatcgtcaaactcttcgccgataaagccgatgtgccgcatatcgcccaaaacgctgcccagcaaaccgtcaaagacaaggctacaacctcgccgtcagcagctatgtcgaagccgaagacacacgcgaaattatcgacatcaaacagctcaacgccgaaatcggcgaaaccgtcgccaaaatcgaacggctgcggcgtgaaattgacgaagtgattgcagagattgaagcatga

SEQ ID NO: 68207 - DNA, 1161 bp, Neisseria meningitidis; identical to SEQ ID NO: 44019

SEQ ID NO: 68208 - DNA, 1527 bp, Neisseria meningitidis
atggattatccaccgcttaagggtgcggcattggcatggattacgctgtctttggggcttgccgtatttatggaagttttagatacgactatcgccaatgtcgccgttcccgttatcgccggcaacctcggtgcggcaaccactcaggggacgtgggtcattacttcttttgctgtggcaaacgccgtttccgtgccgttaacgggatttttggcaaaacgcatcggcgaggtcaaactgtttaccgccgccgccgtcggtttcgtcatcacatcgtggctgtgcggcatcgcgcccaaccttcagtcgctggttattttccgcatcttgcagggctttatcgccgggccgctgattcccttgtcgcaaagcctgttaatggcatcctatccgcccgcaaaacggacgctggcactggcgttgtgggcaatgaccgtcgttgtcgcccctgttctcgggccgatactcggcggttggatttccggaaactggcattggggttggattttcttcattaatatccctatcggtatcatatcggcatggattacatggaaacatttgaaatatcgggaaacggaaaccgttaaaatgccgaccgactatgtcgggcttacattgatggtagtcggtatcggcgcgttacagatgatgctggacaggggtaaggaactcgactggttcgcttcgggagaaatcattaccttgggcgtaaccgcattggtgtgcttgtcgtattttattgtttgggaattgggagaaaaatatccgattgtcgatttatcgctgtttaaagatcggaattttaccgtcggcgtcattgccacgtcattgggttttatggtgtatatggggacgctgaccctgctgccgttagtgttgcagaccaacctgggctatacctccacgtgggcagggcttgccgccgcgcccgtcggcatcctcccagttttcctgtcccccattatcggcaggttcggcaataaaatcgatatgcgcctgctcgtaaccgccagcttcctgacttttgccttcactttctattggcgcaccgatttttatgccgacatggatatcggcaacgtcatctggccgcagttttggcagggggcaggcgttgccatgttcttcctgccgctgaccaccatcacactgtcgcatatgaagggcggacagattgccgccgccggcagcctgtcgaatttcttgcgcgtgctgatgggcggtgtcggcgtatccgtcgttagtaccctgtgggaacggcgcgaagcgttgcaccacacacgctttgccgaacacatcacgccctattccgcaacattgcacgaaacggcggcgcatttgtcccaacaaggcatttccgacattcaaaccctaggtatcatcaacaataccattacccagcagggcttcatcatcggatcgaatgaaatctttatggcaggcagcctgctgttcatcatcatgattcctgtcatatggctggcaaaaccgccgttccacaacggcggcggcggtggacattga

SEQ ID NO: 68209 - DNA, 2373 bp, Neisseria meningitidis
atgaaaccattacaaatgctccctatcgccgcgctggtcggcagtattttcggcaatccggtctttgcggcagatgaagctgcaactgaaaccacacccgttaaggcagaggtaaaagcagtgcgcgttaaaggccagcgcaatgcgcctgcggctgtggaacgcgtcaaccttaaccgtatcaaacaagaaatgatacgcgacaacaaagacttggtgcgctattccaccgatgtcggcttgagcgacagcggccgccatcaaaaaggctttgctgttcgcggcgtggaaggcaaccgtgtcggcgtgagcatagacggtgtaaacctgcctgattccgaagaaaactcgctgtacgcccgttatggcaacttcaacagctcgcgtttgtctatcgaccccgaactcgtacgcaatattgaaatcgtgaagggcgcagactctttcaataccggcagtggtgcattgggcggcggtgtgaattaccaaacgctgcaaggccgtgatttgctgttggacgacaggcaattcggcgtgatgatgaaaaacggttacagcacgcgtaaccgtgaatggacaaataccctcggtttcggtgtgagtaacgaccgcgtggatgctgctttgctgtattcgcaacggcgcggccatgaaaccgaaagcgcgggcaaccgcggctatccggtagaaggtgcgggtaaagaaacgaatatccgcggttccgcccgcggcatccccgatccgtccaaacacaaataccacaacttcttgggtaagattgcttatcaaatcaacgacaaccgccgcatcggcgcatcgcttaacggccagcagggacataattacacggttgaagagtcttataacctgaccgcttcttcctggcgcgaagccgatgacgtaaacagacggcgcaatgctaacctcttttacgaatggatgcctgattcaaattggttgtcgtctttgaaggcggacttcgattatcagaaaaccaaagtggcggcgattaactacaaaggcctgttcccgacgaattacaccacatgggaaactgagtaccataaaaaggaagttggcgaaatatacaaccgcagcatggacacccgattcaaacgttttactttgcgtttggacagccatccgttgcaactcggggggggacaccgcctgtcgtttaaaactttcgccagccgccgtgattttgaaaacctaaaccgcgacgattattacttcagcggccgtgttgttcgaaccaccagcagtatccagcatccggtgaaaaccaccaactacggtttctcactgtctgaccaaattcaatggaacgacgtgttcagtagccgcgcaggtatccgttacgaccacaccaaaatgacgcctcaggaattgaatgccgagtgtcatgcttgtgacaaaacaccacctgcagccaacacttataaaggctggagcggttttgtcggcttggcggcgcaactgaatcaggcttggcgtgtcggttacgacattacttccggctaccgtgtccccaatgcgtccgaagtgtatttcacttacaaccacggttcgggtaattggctgcccaatcccaacctgaaagccgagcgcagcaccacccacaccgtgtctctgcaaggccgcagcgaaaaaggcatgctggatgccaacctgtatcaaagcaattaccgcaatttcctgtctgaagagcagaagctgaccaccagcggcactcccggctgtactgaggaaaatgcttactacagtatatgcagcgacccctacaaagaaaaactggattggcagatgaaaaatatcgacaaggccagaatccgcggtatcgagctgacaggccgtctgaatgtggacaaagtagcgtcttttgttcctgagggctggaaactgttcggctcgctgggttatgcgaaaagcaaactgtcgggcgacaacagcctgctgtccacacagccgctgaaagtgattgccggtatcgactatgaaagtccgagcgaaaaatggggcgtattctcccgcctgacctatctaggcgcgaaaaaggtcaaagacgcgcaatacaccgtttatgaaaacaagggctggggtacgcctttgcagaaaaaggtaaaagattacccgtggctgaacaagtcggcttatgtgtttgatatgtacggcttctacaaaccggctaaaaacctgactttgcgtgcaggcgtgtacaacctgttcaaccgcaaatacaccacttgggattccctgcgcggtttatatagctacagcaccaccaatgcggtcgaccgcgatggcaaaggcttagaccgctaccgcgccccaggccgcaattacgccgtatcgctggaatggaagttttaa

SEQ ID NO: 68210 - DNA, 630 bp, Neisseria meningitidis; identical to SEQ ID NO: 40913

SEQ ID NO: 68211 - DNA, 4476 bp, Neisseria meningitidis
atgcgcttcacacacaccaccccattttgttccgtattgtccaccctcggtctttttgccgtttcccctgcttactcatccattgtccgcaacgatgtcgattaccaatattttcgcgactttgccgaaaataaaggcgcgttcaccgtaggtgcaagcaatatttccatccaagacaagcaaggcaaaatattaggcagggttctcaacggcatccccatgcccgacttccgcgtcagcaaccgccaaaccgccatcgccaccctggttcacccccaatacgtcaacagtgtcaaacacaacgtcggctacggttccatacaattcggaaacgacacccaaaatccagaagaacaagcctatacctaccgcctcgtatcacgcaatccgcacctggactacgactaccaccttccccgcctcaacaaactggttaccgaaatctcacctgccgcactcagcagcgtacccttgcttggaaacggccagccaaaggccaatgcctacctcgataccgaccgcttcccctactttgtacgactcggctcaggcacgcaacaagtccgcaaagcagacggcacgcgtacacgaaccgccccggcataccaatacctgaccggcggcacgccgctgaaagtattggggttccaaaaccacggcttactcgtcggcggcagcctgaccgaccaaccccttaacacctacgcaatcgccggagacagcggttcccccctgtttgccttcgacaagcatgaaaaccgctgggtgcttgcgggcgtactcagcacctacgccggcttcgataatttcttcaacaaatacatcgtcacgcaacccgaattcatccgttccaccatccgccaatacgaaacccggctggatgtcgggctgaccaccaacgaactcatatggcgcgacaacggtaatggcgacagcaccctgcaagggctcaacgaacgcatcaccctgcccattgcaaacccttcgcttgccccacaaaacgacagcaggcacatgccgtctgaagatgccggcaaaacgctcatcctatccagcaggttcgacaacaaaacactgatgctggcagacaatatcaaccaaggcgcaggcgcattgcagttcgacagcaacttcaccgtcgtcggtaaaaaccacacatggcaaggtgcaggcgttatcgtagccgacggcaaacgcgtcttctggcaagtcagcaaccccaaaggcgaccggctctccaaactgggcgcaggcacgcttatcgccaacggacaaggcatcaaccagggcgacatcagcatcggggaaggcactgtcgtactcgcccaaaaagctgcttcagacggcagcaaacaagcattcaaccaagtcggcatcaccagcggcaggggcacggccgtcctcgccgacagccagcaaatcaaatccgaaaacctctatttcggcttcaggggcggacggctcgacctcaacggcaacaaccttgcctttacccatatccgccatgcggacggcggcgcgcaaatcgtcaatcacaaccctgaccaagccgcgacactgacgctgaccggcaaccccgtcctcagtcccgagcatgtcgagtgggtgcaatggggcaaccgtccgcaaggcaacgcggcggtttacgaatacatcaacccgcaccgcaaccgtcggaccgactacttcatactcaaacccggcggcaacccgcgcgaatttttcccgttaaatatggaaaactcaacaagctggcaatttatcggcaacaacaggcaacaggccgccaaacaagtcgcccaagccgaaaatgcccgccccgacctaattaccttcggcggatacttgggtgagaacgcgcaaacgggcaaagccgcaccgagttacagcaaaaccaatatcgaatgggtgaatggtccaaacaccccacacaagccctcgccctatacgaatacgccaacccgcacaggggcaggcgtaccgacgattaccgcctcaaagaaggcggcaaccccggcgcctacttcccatggaatgcctacagcacccaagactgggaatttctcggacatgaccggcgaagcagccatagaaaaaaaccgccatatcgcaaatgccgccgtatacggccggcccgaataccgttacaacggcgcactcaacctgcactatcgtcccaaacgcaccgacagcacgctgttgctcaacggcggcatgaaccttaacggggaagtcttgattgagggcggcaatatgattgtgtcaggcaggcccgtaccccatgcctacgaccaccaggccaaacgcgaacccgttcttgaaaacgaatggaccgacggcagcttcaaggctgcacggttcaccctgcgaaaccatgcccgactgacggcagggcgcaataccgcgcatctggacggcgacataaccgcatacaatctgtccggcatcgacctcggctttatccaaggcaaaacaccggaatgctaccgctcctaccatagcggcagcacccactgcacacccaacgccgttttaaaagccgaaaactatcgtgcactacctgcaacgcaagtacgcggcgacattacccttaacgaccgttcagagctccgcctgggcaaagcacacctgtacggcagcatccgtgccggcaaagacaccgcagtccgcatggaagcagacagcaactggacactttcccagtccagccacaccggcgcactgacgcttgacggcgcacaaattaccctgaaccccgatttcgccaataatacacacaacaaccgcttcaacacactgaccgtcaacggcacacttgacgggttcggcacattccgattcctgaccggcatcgtccgaaaacaaaatgccccccccctcaaactggaaggggacagccgcggcgcattccaaatccacgtcaaaaacaccggacaagaacctcaaacaaccgaatcgcttgcacttgtgagcctcaatccgaaacacagccaccaagcccgattcaccctccaaaacggctatgccgatttgggtgcctaccgctacatcctccgcaaaaacaacaacggatacagcctgtacaacccgctcaaagaggccgaacttcaaattgaagccacgcgtgcggaacatgagcgcaaccaacaggcatacaaccaattacaggcaaccgacatcagcagacaggttcaacatgactctgacgcgaccaggcaggcactacaggcctggcagaacagtcaaaccgaacttgcccgcatcgacagccaagtccaatatctgtccgcccaattgaaacagacagacccgctgaccggcattctgacgcgtgcccaaaacctgtgtgccgcacaaggatacagtgtcgatatctgccgtcaggttgccaaagccgccgacacgaacgacctgacactcttcgaaaccgaactggatacgtatatagaacgtgtagaaatggccgaatccgaacttgacaaagcacggcaaggcggcgatgcgcaagccgtcgaaacagcccggcacgcctacctgaacgcactcaaccgtctgtcccgacaaatccacagtttgaaaaccggcgttgccggcatccgtatgccgaacctggccgaactgatcagccggtcggccaacaccgccgtttccgaacaggccgcctacaataccggccggcaacaggcgggacgccgcatcgaccgccaccttaccgatccgcagcagcaaaacatctggctggaaaccggtacgcaacaaaccgactaccatagcggcacacaccgtccctaccaacaaactaccaactatgcacatatcggcatccaaaccggcatcaccgaccgtctcagtgtcggtacgattttaaccgatgagcgcacaaacaaccgttttgatgaaggcgtatccgcccgaaaccgcagcaacggcgcacatctgttcgtcaaaggggaaaacggcgcactctttgccgcggcagatttaggctacagcaacagccgtacccgatttaccgattatgacggggctgccgtccgccgccacgcatgggatgcaggcatcaacaccggcatcaaaatcgataccggcatcaacctcagaccctatgccggcatccgtataaaccgcagcaacggcaaccggtacgtactcgacggcgcagagataaacagcccggcgcaaatccaaaccacatggcatgccggcatccgtctcgataaaaccgtcgaactgggtcaagccaagctgacccccgccttcagcagcgattactacgatacccgccaaaacagcggttccgccctcagcgtcaacgaccgtaccttactgcagcaagccgcccacggcacactgcataccctgcaaatcgacgccggatacaaaggctggaacgccaaacttcatgccgcttacggcaaagacagcaacaccgcccgccacaaacaggcaggaatcaaaataggctacaactggtaa

SEQ ID NO: 68212 - DNA, 879 bp, Neisseria meningitidis
atgtgtatcgagatgaaatttatattttttgtactgtatgttttgcagtttctgccgtttgcgctgctgcacaagattgccgacctgacgggtttgcttgcctaccttctggtcaaaccgcgccgccgtatcggcgaaatcaatttggcaaaatgtttttccgaatggagtgaggaaaagcgtaaaaccgtgttgaaacagcatttcaaacacatggcgaaactgatgttggaatacggtttatattggtacgcgcctgccggacgtttgaaatcgctggtgcgctaccgcaataagcattatttggacgacgcgctggcggcgggggaaaaagtcatcatcctgtatccgcacttcaccgcgttcgagatggcggtgtacgcgcttaatcaggatatcccgctgatcagtatgtattcccatcaaaacaagatattggacgaacagattttgaaaggccgcaaccgctatcacaacgtcttccttatcgggcgcaccgaagggctgcgcgccctcgtcaaacagttccgcaaaagcagcgcgccgtttctgtatctgcccgatcaggatttcggacgcaacgattcggtttttgtggattttttcggtattcagacggcaacgattaccggattgagccgcattgccgcgcttgcaaatgcaaaagtgatacccgccattcccgtccgcgaggcagacaatacggttacattgcatttctaccctgcttggaaatcctttccgggtgaagacgcgaaagccgacgcgcagcgcatgaaccgttttatcgaagacagggtgcgcgaacatccggaacaatatttttggctgcacaagcgttttaaaacccgtccggaaggcagccccgatttttactga

SEQ ID NO: 68213 - DNA, 849 bp, Neisseria meningitidis
atgaccttactcggaataaagctcaaacagacccagcagctcaaccagcggctgcaacaatctttgcgcgtattgcagatgtcgggtatcgaacttgaacgcgaggtcgaaaactggctgtcggacaatcccctgctcgaacgcaaagacacggatgaattttccgatgccgggttccattacaccgcgcccgcgcgtcaaatcggcggagacgaaggcgaagatatgctgtccaacatcgtcggcgaagaagatttcaagcaatacctgcacgcgcaagtgtgcgaacacccccttcccgaccaagaagccgcctgcgtccacatccttatcgatttccttgacgagcagggttatctgaccgacagcatcgaagacatcctcgaccatacgcccttggagtggatgttggatgaagcaatgctgaaacaagccctgactgcattgcaaaaattcgacccggcaggcgtggccgccgccgatttgaacgaatcgctgatactgcagatagaaagatcgggcgaatgtgctgccaaacccgccgccctgcatatcgtccgaaacgccctcgacagcattgacggcaaccgcagccaaaccctcgcgcgaataaaaaaacgcctgccccaaaccgacagcggcacactcgaagccgcactcgacctcattgcttcgctcaatccctttcccgccgctggttttgcctcgtccacacccacgccgtattctgacgaggcactcgccaacctgctggctttccgcggcatggaggtttctcgccgcaccgttgccaaatacagagaatcctttgagattccggcagcacacaaacgcaaaaccgcagaataa

SEQ ID NO: 68214 - DNA, 978 bp, Neisseria meningitidis
atgcaagaaaacccgaccgtgtggctgttcgacctcgacaacacgctgcacaatgccgatgccggcctcttcacactcatcaaccgcgctatgacacgctatatggcacgccgcctcaaactctccgaatctgccgcgtccgacctgcgtcaagactattggcaccgctacggcgcaacgctcgccggactgcaaatccaccatcccgaaatcgacatcgccgaatttttgcgcgaaagccatccgatcgatgcaatcctgaccaggctgcacggcatggcggatacggaaaacaccctatgccgtctgaacgggcgcaaggcggttttttccaacggcccgtcgttttacgtccgtgccgttgtcggcgcactcggtttggaaaaccgtttcgacgcactgttcggcacggatgatttcgggctgctgtacaaacccaatccgcaagcgtatctcaatgtctgccgcctgttggacgtaccgcccgaatgctgcattatggtggacgacagcgcggacaacctgcatcaggcaaaagcattgggcatgaaaaccgtccggttcggtgcaaaagtgcacgacctgccctttatcgatgcttccgtaagcgatatggcgcaactggctcggtatgcagaaactttgtcagaacaccgccaaaatcattacaataccccacaacccccgaaaatacgaaagaatgttatgcgtaaaaccttccttatcctgatgactgccgccgcccttttgtcgggctgcgcgtgggaaacttatcaagacggcaacggcaagaccgccgtccgtcaaaaatatcccgccggcacgcccgtttattaccaagacggcagctactcgaaaaatatgaactacaaccaataccgtcccgaacgccatgccgtgttacccaaccaaaccggcaacaacgccgacgaagagcatcgccaacactggcaaaagcccaaatttcaaaaccgataa

SEQ ID NO: 68215 - DNA, 459 bp, Neisseria meningitidis; identical to SEQ ID NO: 38813

SEQ ID NO: 68216 - DNA, 345 bp, Neisseria meningitidis
ttgcgcactcactttgtcatttccaatgttccaagtacacctgcttcgctaagaggaagacagcttgaaggaaaacttattttagaagttcctgctcaggtcaatccaattccacaatctgtattaagggcggcacaagaagaaaatgttatcattagagatacaacaggaaggatttacaataggtggtggtttagtattaggtggttgtgcaggtgcacatcttgcaagaaaagaaccattgatactaacagggaaaacaggggcaggtgcgtcagcaattgcaaatgcaagcattggatatcaatggactgtcaatttgtcagagccaaaagaaggagctaa

SEQ ID NO: 68217 - DNA, 1275 bp, Neisseria meningitidis
atgaatagacccaagcaacccttcttccgtcccgaagtcgccgttgcccgccaaaccagcctgacgggtaaagtgattctgacacgaccgttgtcattttccctatggacgacatttgcatcgatatctgcgttattgattatcctgtttttgatatttggtaactatacgcgaaagacaacagtggagggacaaattttacctgcatcgggcgtaatcagggtgtatgcaccggatacggggacaattacagcgaaattcgtggaagatggagaaaaggttaaggctggcgacaagctatttgcgctttcgacctcacgtttcggcgcaggagatagcgtgcagcagcagttgaaaacggaggcagttttgaagaaaacgttggcagaacaggaactgggtcgtctgaagctgatacacgggaatgaaacgcgcagccttaaagcaactgtcgaacgtttggaaaaccaggaactccatatttcgcaacagatagacggtcagaaaaggcgcattagacttgcggaagaaatgttgcagaaatatcgtttcctatccgccaatgatgcagtgccaaaacaagaaatgatgaatgtcaaggcagagcttttagagcagaaagccaaacttgatgcctaccgccgagaagaagtcgggctgcttcaggaaatccgcacgcagaatctgacattggccagcctcccccagcggcatgagacagaacaaagctggcttgaacgcaccattgccgatatttctcaagaagttttggattttgaaatgcgctctgaacaaatcatccgtgcagaacggtcgggttatatagcaataccgaacgtcgaagtcggacagcaggttgatccttccaaactgctcttgagcattgttcccgaacgtaccgagctatatgcccatctatatatccccagcagtgcagcaggctttatcaagccgaaagacaaggttgtcctacgttatcaggcatatccctatcaaaaattcgggcttgcttccggcagtgtcgtatcagtagcaaaaacggcactgggcagacaggaattgtcgggattgggcatggtatcctccgatttggcgaagagcaacgaacctgtttatctcgtgaaaataaaacccgacaaaccaaccatcactgcatacggtgaggaaaaaccgctgcaaatcggcatgacgttggaagcagacatcctgcacgagaaacggcggctgtacgaatgggtattggagctgatttatagtatgtcgggcaaactgtaa

SEQ ID NO: 68218 - DNA, 1041 bp, Neisseria meningitidis
atgaaagcaatggtttatcacggcgcaaacgacatccgttttgaagaaaaaccccgtccgcagattatcgatccgaccgatgcggtggtgaaaatcgtcaaaaccacgatttgcggtaccgatttgggtatttggaaaggcaaaaaacccgaagtcgccgacggtcgtattctcggtcatgaaagcatcggtattgtagaagaagtcggcgaggctgtaaaaaacatcaaagtcggcgataaagtcattatttcatgcgtcagcaaatgctgtacttgcgacaactgcaaaatccaactttattcgcattgccgcaacggcggctggattttgggctacatgattgacggcacgcaggcagaatacgtccgcacgccttatgccgacaacagcctcgtgccgctgcccgacaacgtcaacgaagaagtcgccctgttgttgagcgacgctttgccgaccgcacacgaaatcggcgtgcaatacggcgatgtcaaacccggcgacaccgtattcatcgcaggtgccgctcctgtcggtatgtccgccttgttgaccgcccaactgtatagccccgccgccattatcgtgtgcgatatggacgaaaaccgtttgaaactggcgaaagagttgggcgcgacccataccatcagccccgcttccggcgacgtctccaaacaagttttcgccatcgtcggtgaagacggcgtagattgtgccatcgaagcggtcggtatccctgcaacttggaatatgtgccaagacatcgtgaaacccggcggccatatcgccgttgtcggcgtacacggtcaatccgttgatttcaaactggaaaaactgtggattaaaaagcttgccatcactaccggcctggtaaacgccaataccaccgaaatgctgatgaaggcaatttccagcagctccgtcgattacaccaaaatgttgacccaccgtttcaaattcagcgaattggaaaaagcctacgacgtgttcaaacacgccgccgaaaatcaagcgatgaaagtggttttggaagcggattaa

SEQ ID NO: 68219 - DNA, 444 bp, Neisseria meningitidis; identical to SEQ ID NO: 38644

SEQ ID NO: 68220 - DNA, 1281 bp, Neisseria meningitidis
atggaaaactcattgaaagaagccgccctcaagttccacgaattacccgttccgggcaaaatttccgttaccccgaccaaatctctggcgaccgacaaagatttggcgttggcgtactctccgggcgtagccgctccttgtatggaaatccatgccgatccgcaaaatgcctacaaatacaccgccaaaggcaacttggtcgctgtcatttccaacggtacggccgttttgggcttgggcgacatcggcgcgctggcgggcaaacccgtgatggaaggcaaaggcgtattgttcaaaaaattcgccggtgtggacgtgttcgacatcgaaatcgatgaaaaagacccgcaaaaactcgtggacatcatcgccgctttagagccgaccttcggcggcatcaacctcgaagacatcaaagcacccgagtgtttctacatcgaacgcgaattacgcaaacgctgcaaaatccccgtattccacgacgaccagcacggcacggccatcattaccgccgccgccgtattgaacgccctgcgttttaccggccgtaaaatcgaagaagcgactttggtgtgttccggcgcaggtgcggccgcgattgcctgcttgaaccaattgctggatttgggcttgaaacgcgaaaacgtgaccgtttgcgactccaaaggcgtgatttaccaaacccgcgaagacaaagaccgcatggatgagtctaaacagttctacgccattgaagacaacggccagcgcgtgcttgccgatgccgtcaaaggcaaagacatcttcttgggcctctccggcgcgaacctgctgacgcctgaaatgctgaacaccatgaacgaaaaacccatcgtgttcgccatggccaacccgaatccggaaattctgccgccgctggcgaaagaaacccgtccggacgtggttatcggtaccggccgctccgacttcccgaaccaagtgaacaatgtattgtgcttcccgttcatcttccgcggtgcgttggatgtcggcgcgacgaccatcaacgaagaaatgaaacgcgcctgcgtgtatgctttggcggatttggcgatggaagaagtaaccgaagaagtggttgccgcttacggtaagaaatttgaattcggcgcggaatacctgattccgactccgttcgattcccgcctgctgccgcgcgttgctacggctgccgccaaagcagcgatggaaagcggcgtggcaacccgtccgattgcagatttggaagcttacgctgccaagctgagcgaatggaagctgtaa

SEQ ID NO: 68221 - DNA, 1302 bp, Neisseria meningitidis
atgtattgggaacgcggtctgcacatgtataaggcaagtgccgtcgtgccgacgggatatgtacgggttgggaataccgcgccgctggttggcgaagacacgcagcagtatgcctctttttggggcgacggctacgacgtgtaccgtcagttgagatggcagcagatacccgaaaaacagagaaaggcattcaaaaaagccgccaaaagcaaaaagaccgtgatgtttgccggacgggaatacggcatatccaaacagaatttgagcgatgtttgggatgattttgaagacgcgatggaactgaaggtgtttccctgcctgtcttcgctgtttctgaccaaatggcataaaaatctatatgaatatctggaggaatatccgtttatcacccgattgtgtctggaaaaccacggtcagaccgtgctggatttcagcaatacgcgcataaccgacctttctgtcgatatgaccggcgtggaatcgctttatctgaacgaaggcttggacagcctgaacctgaaaggcgaaatcaaggaaaactgcaaggtctataccgccgaaaagggcgcgggtctgattttggaagtgggcaaaagcgttcccaaagtgcggggtttggaaaacctgaccgccgtcaacgtcatgggcattgccgatttcgatatgcaaaacctgtcggaaacgtatcccaagctcaaaaccatacggctgtggggcaaaccgggcaatatcgccaatttttccgccgtatcgggatttgaggatttggaagtgttcactaccgtagatttgttcggtttcggcgcggacgacatcccgcatcccaaccggctgccgaagctgcacaggctgtggatgagcagcctgcccgaagaggcggcgaaggcagtgaagaaactttataagaaacggaaggaagacggtctagacctgtggatagaaaaagcccgaaaacccgaatggctggcgcaaaatttcgacaaccccttccgcgattgggacggcgcggagcacatcccgaaaagccatgccaaaaaagcggcggagctgtaccggaaaacccgtgccggcgtggtcaaactgctcggcaatccgcctggaaacataggagaggggctggcagaggcggtcaaagcctataccggaggtttcaacaaaatggacaaaaaacactttatcgacacggtagaacgggaagatattgccgaggcgttggaaacgatattgaacctgataccggaggggtcttgtgctgacaaggaaaaactgtttgaaatatttgataaaaacaggaatttttaa

SEQ ID NO: 68222 - DNA, 267 bp, Neisseria meningitidis
ttgtactgtctgcggcttcgccgccttgtcctgatttttgttaatccactatatgctgatgccggagacgtatattgcgtctataacatcagactgaagcagtacactgcctgccaggttacccgagttgaagaacacggtggcaaaaaaacacgtgcgaccctgctggctttggactggcagggcaacaaaccgcttggggcggaggagctggcggatttgaaaccgctttacaaagacttaaagaataatattggaaatattgta

SEQ ID NO: 68223 - DNA, 174 bp, Neisseria meningitidis; identical to SEQ ID NO: 40073

SEQ ID NO: 68224 - DNA, 333 bp, Neisseria meningitidis
ctatacatcatcgctactaccgttccggcgcaacaaacattcctcgatgccgccgaactgatgcaatggagtatagaaaccgaagggctgggcttgaacgtcatctcgcacaagatactcggcaaagaccacgcccaagtcgaatttgaagcctacttccgagacggacaacaccgatccgcgcatcacgaactgtccggcttcgtcaacatcggcggacaatggtattttatcgatcccaccgttccgcatcctgcgatgaaacaaccctgcatttgcggatcaggcaaaaaattcaaagcctgctgcggcaaatatctgaaacctgtcgca

SEQ ID NO: 68225 - DNA, 201 bp, Neisseria meningitidis
atggcggcaccccccgacaaaaaaacaatccggaacgcatctgaccgttccggcttgttttcaggcgcatccgccgcatcagaacatactgcgcacgcccatattgacctgccaagtctggcgcatcgtgtgcatcgaagacctttgcgcctcaaaataaagctgccttccgttgtcggcattaccacgcaaaaaaaatga

SEQ ID NO: 68226 - DNA, 198 bp, Neisseria meningitidis
gtggataccgttggcagtttagcgattggttatgccacaggcggcaatgctggggcttttactgatgcgaatgcagattggaataatcggcagttgcattcgagtgaatataaattagcagaacaatatgcagacatagtagcttctcgtctaaacatttcaaaagaaacttgtacggtaatttatttgggaataaac

SEQ ID NO: 68227 - DNA, 195 bp, Neisseria meningitidis
ttgaggcaggcatttcagacggcattccttaaatgcgtgtacctgtggtgttccaaaaggtcgtctgaaagtgcagcttctgcgaagctaaagcgcagtatcaacgaagttaaaatttgcctgaaccttaaaggcagcctgcaccccaatcccctctccccgtgggagagggctaggacgaggctggcaaactga

SEQ ID NO: 68228 - DNA, 417 bp, Neisseria meningitidis; identical to SEQ ID NO: 46069

SEQ ID NO: 68229 - DNA, 204 bp, Neisseria meningitidis
atggatacgaccctgaagcataaagccgaagcccttttgggcgagccgcttttagacgaacccgtccgccccgagtcgtgggaatgctgcggcagcgactgcggcgacgcgtgcattcagacgatttactgggcggacaaggcccgctacgacgcgcaacggcggaaattgaaagaagcgggttggtcggacgatgccgtctga

SEQ ID NO: 68230 - DNA, 207 bp, Neisseria meningitidis
atgaatattattggtaaattgaaagaagctgcttcctattttcttacaaaattgattggagaaaatcctagtaataagcaggtaaaccgcgcacttatacagatgccaaatgttcgtccgatacacacctatccacgcccaaatttaagaaactcaggcgtggcggctgctaaacgtgcggcgcgcaaacgcaagaatcgtcgttaa

SEQ ID NO: 68231 - DNA, 195 bp, Neisseria meningitidis
gtgaagcataagctcgcgtcttggtggaaaaccatcaagctgacggcaaacttgatggcaggcgtgcccgattatgaaaactacgttgcacagcagcgcaaacataatcccaacgcccccgtgatgaccaagctgcagtttcaagactattgccgcaaacgccgctgcggcgcaaacggcggacgctgctgttag

SEQ ID NO: 68232 - DNA, 440 bp, Neisseria meningitidis
atgaagtggttattaaatatgataatgagacctattaaatttagtatggtaaatacgttattatttattgttatatgtagttcattttttgatctgctcgttcaattatgtacaattttatttcatagccaaaaaatatactttattacattatttttattatttatttttaattttgttacaaaatctatctatatggcaattatttatcctattttatatttttttacgataaaaaatattatccttactctaggaaagtgataattctattatcattagcattatctatatattttagttttatggacttttactttttttccatatattcagataaccttagctatgaaacggagtctttacatttatacatccctattattattaattttttctcacttttagtttctaattttattttatcttttatcaacaag

SEQ ID NO: 68233 - DNA, 195 bp, Neisseria meningitidis
atgtcctatgatttatcgaaacgacttgtaatcggcttagcatcaagtgccctattcgacttatccgaatcggataatatatttagaatggaaggggcagaaacctataggcaatatcagagggaaaaacaaaaccatcccctaaaaaaggcgttgtctttccatttattaaaaaacttctgtcaatcaatgaaa

SEQ ID NO: 68234 - DNA, 207 bp, Neisseria meningitidis
atgccttatgtcaatattaaagtaaccggcggcaaggaagcaccgactgccgcgcaaaaagcggaactgatcggcggcgtaaccgaattgctggcacgcgtgctgggcaaaaatcccgaaacaacggttgtcgtgattgatgaagtggataccgataactggggaataggcggcaaaagcgtcagcgaacggcgcaaagagggcagg

SEQ ID NO: 68235 - DNA, 798 bp, Neisseria meningitidis
atggcagacatcctgccatccgacaagcggcggcaaccgccaaaaacgaaaggaagtacgatgaacataatcgaacaagaaatgaaacactccagtctgagaaaagtagatgtcgaaatcgccaaaatcattgcagacgcgcacaaaatcaacgccgaatccgtaaaaatagcccaagaatcccgatggtatcccatgatggcggccaccgggctggttaccgccatcgccgccgtgttggcactgatattcaaatttgcctgaccacaagccccgcgagaggctttatcccccgaacaaaatgaacagagccgcactattcaaccgctaccccgaatggattatcgggcaagacggcgcaagccgtttcattacccattgccgctatccccgcctgattgccaaaatccacaggcagacagacggcgaatgcccgggcgggcattaccgccattccgaaaacggcatcaccctttacgattttatttttttcgacggaaaaccggcagacgaagcccgatttgccgccgtccttaccgaaacctgccgccgggcagtcaaaaaaatatgcgaaacaaaataaaccgcaacgacatggaattcggctacacaccttacaacctgcgcaaccgctgcaaactgatacaggccgagttggcgcaaatcgtcggggtgaagcactacatacaggtaggccgctgggaagccgaacccgataccgaaacgcggcgggccgatatgccgctggaaaaatggcggcagttcctcgattggacagaaaaaacaaacgccgtctga

SEQ ID NO: 68236 - DNA, 978 bp, Neisseria meningitidis
atggcaatggcagaaaacggaaaatatctcgactgggcgcgcgaagtgttgcacaccgaagcggaaggcttgcgcgaaattgcggcggatttggacgaaaacttcgcccttgcggcggacgcgttgttgcactgcaaaggcagggtcgttatcacgggcatgggcaagtcgggacatatcgggcgcaaaatggcggcaaccatggcctcgaccggcacgcccgcgtttttcgtccaccctgcggaagcggcacacggcgatttgggcatgattgtggacaacgacgttgtcgtcgcgatttccaattccggcgaaagcgacgaaatcgccgccatcatccctgcactcaaacgcaaaaacatcacgcttgtctgcattaccgcccgccccgattcaaccatggcgcgccatgccgacatccacatcaccgcatcggtttcgcaagaagcctgcccgctggggcttgccccgaccaccagcaccaccgccgtcatggctttgggcgatgcgttggcggttgtcctgctgcgcgcccgcgcgttcacgcccgacgacttcgccttgagccaccctgccggcagcctcggcaaacgcctgcttttacgcgttgccgacattatgcacaaaggtggcggcctgcctgccgtccgactcggcacgcccttgaaagaagccatcgtcagcatgagtgaaaaagggctggggatgctggcggtaacggacgggcaaggccgtctgaaaggcgtattcaccgacggcgatttgcgccgcctgtttcaagaatgcgacaattttaccggtctttcgatagacgaagtcatgcatacacaccctaaaaccatcgccgccgaacgcctcgccaccgaagccctgaaagtcatgcaggcaaaccatgtgaacgggcttctggttaccgatgcagacggcgtgctgatcggcgcgctgaatatgcacgacctgctggcggcacggattgta

SEQ ID NO: 68237 - DNA, 602 bp, Neisseria meningitidis
atgaataccgacttccaaaacatcctcaaacaactgggcaaacaagcccaaaaagaagcggcagaaaaacaggcagccgaaaaaaacaagcaaaaacaagaacaggatttcgatttttcacaagcagtcggacaactctccccattaaaaaaccggcagcaatattatgcgccgcccgacaaaacccccatcaaagtccgtcccaaagacaaccgcgccgacgaagaaaactacttctacatcggcagcacatacaacgacccgcccgccagcttcagcaaaaacggacagggaaaaacgacatccaacgcctgaaaaacggatactatcccgtcgttaccgatgtcgacctgcacggctacacacaggaagaagcccaaaaagtcctcaacgaattcatcgcattcacccaaaaacgcggcgtatgcggcgaaatcatccacggcagcggattaggttccaaaggctacaaacccgttctgaaaaatatgacccgaaactggctgatgcaacaccccgacgtactcgcctacgccgaaccccgggaaggcaacgacggctgcgtccgcatcctgctcaaacgcaaattaaggcagcaagac

SEQ ID NO: 68238 - DNA, 303 bp, Neisseria meningitidis; identical to SEQ ID NO: 40930

SEQ ID NO: 68239 - DNA, 219 bp, Neisseria meningitidis; identical to SEQ ID NO: 40094

SEQ ID NO: 68240 - DNA, 216 bp, Neisseria meningitidis; identical to SEQ ID NO: 44075

SEQ ID NO: 68241 - DNA, 660 bp, Neisseria meningitidis
atgggcaggcatttcgggcgcaggcgttttctgacggttgccgccgttgcggcggcgggcgcggcggtttctttcctgccgaatccttttgccgccgatgatgaaaaacgcaacggggatgaaaaacgcaatgaaaatgtgtttttctctggaaaggtgtcgcgctgggttccggtgcggagctgcgcctgttcggcgtggataacagacaggcggcggatttggtcaacaaggttttggcggaagtggcgcgtttggaaaaaattgttcagcctttaccgtgaagacagcctgatcagccgtctgaaccgtgacggttatttgacttcgccgccggcggattttttggaactgttgagcctgtgccgcgatattcacgcgctgacgggaggcgcgttcgatccgacagtgcaggcgttgtggaaactgtatgccgattattttgccgcccgtcccgatgcggaaacgccgccgccggagaatagcgtgaaggaagccctgaaacgggtcggcttcggcaaagtctcgtttgacgaccgtgaaatccgttttgccgaaaagggtatgggtttgtccttgaacggcatcgcgcaaggctatagtggattaacaaaaaccagtacggcgttgcctcgccttagctcaaagagaacgattctc

SEQ ID NO: 68242 - DNA, 222 bp, Neisseria meningitidis
atgaatcaaaagtatattttatctgcaaacaataatagtttgatagaagaaattcacaatacagtacagcgtattggttattgtattgttcgcggtcttaatctaaaccatcttgatggcagccggagaaacaagaaattatttgactttctatctcaattaggaatgctgacaaaccacaaaggcgatggttttaaatctatattttgggatattaaatat

SEQ ID NO: 68243 - DNA, 2121 bp, Neisseria meningitidis
atgggcaaagccaacgcctttaccgcgccgattaccgtcgtcaactacgacgaacaagccctcaacaacaccgaagcgcgtactttggtggatgccgtagcgaaaaaagacgcttccgtttggcagttcggcggagaaagcaacacgctgaccggactgtatttcagaggttatcagcttgatgcgcgccaattcagcgtcaacggtttggcaggtatgtacggcacgcaaggcacggccagcgtgcaagtcggctccgcacaactgattaaaggcgcgtccaccgccgtaaacggcatgaaccctgaaggtgcggtatccggttccgtcaatatcgaaaccaaaaaagccgccgatgaaggcaaccgcaaaatcggtttgggccggtttagcaacaaccgcgcccaaggtacgttcgacttgggtcaacgcttcggcgaaaacaaagcattcggcgtacgcgccaacggcaaactgcgccacggcgacactccgcgccacggttacagcgaagacaacaaagaatttgcggtaaatgccgactatcgcggcgaaacactgcgcgtagcgttcgattccatctacgcaaaacgcaaaaccaacggcggtcgcgcgcgtatgcaggacattcaaaacgccggcggacgcttgtttggcgcgcccgatggtaaaaccaacctgctgccttcttggaactggcaaaataccgccggccaaaccaatatgcttacgtttgaatgggatgcgtttgataatgcacagattacaggcggtatcggctacaacaaggcacgctattacggcacgctgatttccccgaccgtatgtttgaatgctaccagcacttgtaccgatatgcaaaacacaaacgccagcggcaaagtaacggcacgcaactatgactacaataccggtactgcgcgcctgaccgaccaatatttccgcacattgagtatgaacctgaccgcacgcggcgaatttgaaaccagcccggtaacacataactggagtacggctttcgaccgcgttatccgccagcggaaaaccattcgcggaacggcagccggcgctggcaaggtagaagtgaaggcaaacgaaaatattgcgaatcaattggcatcgttcaaagccgactatcccaattcttgggagaactctgccaacttggatgccaatatcaaagtcaacagcctggctttgtccgacaccttgggcttcgtggataacaaataccgcctgactttgggcggacgtttccaagcggttgaatacaccaataagaaaaaatcacagagcggcgatgccaaacgcttcagcccgatgctgatggcggcgtgggtgccgcaacctgatttggttgtgtacggcaactatatggaagacttggagcctgccgatatcaaaaccgatgattccggcgaaacgacaatggcgaaaccgcgtgtcagccgtcagtttgaagtgggcgtgcgtaaaaactggggcaatttcgtaaccacgttaaacgcgttccaaatcaaacgcccgggctactggcgcggtcatacaactaccaagacaacaaaaggggtaacaacaacgctgacctatggcaacaattccgatttcgcccgctataaggcgcaaggcggcgcggccggcgacgagcaaggtatggaacgcaatcgcggtattgagttcaacacctacgcgaacttgctcaacaatactttgcgtccgactttgggtctgatgtatctgcaatcgaccgtgaaagagtatccaaattcacgcgatatgctggttaacggcgtacaagtcgccaatccgcgcgtaattgccaaagcaggtttggaatgggatacaccgtttgccaaaggattgactttaaacggtaatgtttcgtatttcggcaagtcttaccaagacacgcaaaaacaatacgccttcccgtcctacaccttgattgacgtaggcgcgcgctacaaaaccaagctcggcaaaaatactttgaccgtcagcagctcggtggaaaacctgttcaacaaaaactattggcaggtacagcgcggccaatacgaccgcagcttcgccgtcgtcggtatgccgcgcacttactggctgaaggcggaattggatttc

SEQ ID NO: 68244 - DNA, 423 bp, Neisseria meningitidis
atgataaacatgaaaacatcaacggttgtttttggcggattttttattacagataatggagaacgaatccaaatccccgttttggaaaatcctggcattaaagaaatcaatcactttttttccatatcaaattttgagaaaaaagccggcgtccttgttttcagaatcatccccgagccggaatttggcaataccgaattaactatctattttgaaaaaggatattatttgccaatgattcaaacaattttagaaggcggggatattgaagtcaaaaaccttaaaacggaaaattatagtggaaatacaatggaaatttggggagattcctaccctattgagcatatctctaaaaatatttctacaattcaaaatataatttctgaatttatgatacaaaaacaaacaccggcaccaataatt

SEQ ID NO: 68245 - DNA, 339 bp, Neisseria meningitidis
ttgtttgtatgctttgaaaaatgtttgtttccggattttgccattcccatccggttttgcgctgtacgatgtgttttagcgcggacttgctcaaaatcggatgtggttccggtatttgaggctttgattagggatgcggactttcaatatatttttctcagctacaacaacgaaggcttgatgtctgtcgggcaggtaagggagatttttgagcgtttcggcaaatatgatttggttcaaacggaataccggcggtttaaggcagataaaacagaaaaccgtaaccataaggcaaattcgacattcgaatatctgcatattttagaaaagaccttttaa

SEQ ID NO: 68246 - DNA, 204 bp, Neisseria meningitidis
atgccctctccccagccctcccccacgggggagggagaaggttgcagcagattttgcggttgcaggcgatttgaaaggcaacttagatttgcagctgttgtttcaggtcatctgaaaaataaaaagcagcctgcacaacctgttttccttgcagaacccttaatcccaaccgccaccacgtcctctctccccgtgggagagagt

SEQ ID NO: 68247 - DNA, 213 bp, Neisseria meningitidis; identical to SEQ ID NO: 40104

SEQ ID NO: 68248 - DNA, 177 bp, Neisseria meningitidis; identical to SEQ ID NO: 39255

SEQ ID NO: 68249 - DNA, 690 bp, Neisseria meningitidis
  misc_feature 675, 676, 677, 678, 679: 'n' is a, c, g or t
atgcatcactttgggcgggctgcgacgagttgcgcggcggtatggatgcgagcctttataaagaactatgtgcttacgctattgtttttaaaatacgtttccgacaaacacaagcaaggcggcggcatgattgagctgcccgccggtacgacttttgacgacatcgtcaaactcaaaaacaccgccgacatcggcgatcgcctgaataagatcatcgcccaaattgccgaagccaacgacttaaaaggcgtgatcgacgttaccgacttcaacgacgaagacaaactgggtaaaggtaaggagatgatcgaccgtttgagcaggcttgtcggcatttttaaaaagctcaacctttcttccaaccaagccgaagacgacgatttgttaggtgatgcctacgaatacctgatgcgccattttgcgaccgagtcaggcaaatccaaagggcagagacctttgcaaaattcctttccctcccgacagccgaaatccaaacacaggttttcggctgttttcggctgtttccgccccagatacctcctaattctacccaaacgcccccttaatcctgcccggatacccgataatcaggcatccgggctgccttttaggcggcagcgggcgcacttagcctgttggcggctttcaacaggttcaaacacatcgccttcagannnnncacacacttaa

SEQ ID NO: 68250 - DNA, 1131 bp, Neisseria meningitidis
atgaaaatcgtttttatcacaacagtcgcatccagcatttacggtttccgcgcccccgtcattaaaaaattaatcggcaaaaaccatcaggtgtatgcctttgtatcggagttttccgataatgaattggatattatcagggaaatgggggttacacccgttacctaccgttcaaaccgcagcgggctgaacccgttttccgatataaaatccaccttcctcatatttaaagaactcaaaaaaatatcgccggatttggttttcccttatttcgcaaaacccgtgattttcggcacttttgccgcaaaactggcaggcgtgcccagaatcgtcgggatgctggaaggtttgggattcgcatttaccccgcagccggaaggcataccgttaaaaacaaaaatcataaaggggattttgattgccttgtaccacattgccctgccgatgttggaaagcctgattgtattaaaccccgacgacaaagacgaactgacggacaaatacggcatcaaaataaaaaacatccatattttgggcggaatcggtctggatttgcggcaatatccttattccgaggcggatattcccgatgaaaaagaacccgtaaaattcctctttatcggcagatttctgaaagaaaaggggattgatgattttattcgggcggcggaacaggttaaggacaaataccccgatacggtttttaccgctttgggcgcaatcgacaaatcacgcgggggggggggcgatttggaacgccttgccgcccgcgatattatccgtttccccggttttgtgaacaatgtttccgaagtgataaaagaacatcatatattcgtattgccgtcttattatagggaaggcgttccccgaagcactcaggaggcaatggccgtcggcagggcagtgattacgacggatgtccccggatgcagggaaacggtcgccgacaaggtcaacggcttcctgatcgaaccttggaatccccgcatcttggccgaaaaaatgatttattttatcgaaaacagggaagccgtccgcctgatggggaatgcaagttatgcgattgccaaagataaattcgatgccgaaaaagtcgatttgaaattgctcgatattttgaaggcgtaa

SEQ ID NO: 68251 - DNA, 1362 bp, Neisseria meningitidis
atgtcttccccttcaaataccaatcgtcaaacctgatccagccgattaacctatatcctgaccgttgccggcgcgactgtcggcttcggcgcgacgtggcgtttcccgtatttggtcggtgaaaacggcggcggcgcgtatgtgtttttattctgtatcgccatgctcgttatcggcatcccgatgattttggtggaaaacgtcatcggacggcgcaaaggcgtgaacgcgctggatgcgttcggcggcccgatgaacggcaaacccattgccaaaatttggaaactggtcggctggatgggcttcggcgcgttcggcatcatggcttattacatggtactcggcggctgggtaatcagctatatcgttaatattattggaggaaatttgaatatttccagccccgtcgacggtgtggttacaaaaggcttctttgccgaacacattgacagcccttgggaaattgcgttttatacgctgctttttgtcgccgtgaaccaatggattttggtcaaaggcgttatcggcggcattgaaaaagcggcaaaatagctgatgccgctgctgtttttgttcctaatcgcgatggtcgtccgcaacgttacccttccgggcgcaatggaaggggttgctttctatctgaaacctgatttcagcaagattaccgccgaactgttcgtcttcgttttggggcaggtattttttgccctgagcctgggtttcggcgtgatgattaccttgtccagctatttggataaaaacgaaaatctggttcagacggcagttatcacggcaattaccaataccatcatcgccatacttgcgggctttatgattttcccgtcgctcttcagcttcggcgttgcccccgattccggcccgactttggtgttccaaagcttgccgattgtgttctcacatatgtgggcgagatctgtgttcgccgtgattttcttctcgctgctcctgattgccgcattgacgacttcgctgaccatttatgaagtgttgattacgaccattcaggaaaaaaccaaaatccgccgtaccgccgcgattacgattgtattagccgccatcttcattttcggcaacatcccgtccattctgagctatggttcgtggaaagacgttctgttcggcaaaaatattttcgatgccttcgactacatcagcggcaacatcttgtttatgctgaccgcgctcggtttcgcgctgtttgtcggttttgtgatgaaggacgaagcgaaggaagaattgctttacaaaggcaaccatacgacggtcaatatttggtttgcttatgtgaaatatcttgtgccgttggtgattttgctgatttttgtcagcaacctgttctaa

SEQ ID NO: 68252 - DNA, 294 bp, Neisseria meningitidis; identical to SEQ ID NO: 40076

SEQ ID NO: 68253 - DNA, 153 bp, Neisseria meningitidis
atgaagataacacactgcaaattaaagaaaaaagtacagaaagaactgctccgttttttgtactggaagttaccgcccgttctgcatctgcaaaccgttttgtctgattacgcccgatttgacgatgcactactgtcctactttgattttaat

SEQ ID NO: 68254 - DNA, 429 bp, Neisseria meningitidis
atgaccgaaaacgcacaggacaaggcgcggcaggctgtcgaaaccgtcgtcaaatccccggagcttgtcgagcaaatcctgtccgacgagtacgtgcaaataatgatagcccggcgtttccattgaccgttgccgccgccgtccgacttggcgcaatacaacgacattatcagcaacggggcagaccgcattatggcaatggcggaaaaagaacaagccgtccggcacgaaaccatacggcaagaccaaaccttcaacaggcgcgggcaactgtacggcttcatcagcgtcatcctgatactgctttttgccgtcttcctcgtatggagcggctaccccgcaaccgccgcctcccttgtcggcggcacagtgtttgccttggcgtgtgctttcgtgattggaagaagccgagaccaaggcaaaaattaa

SEQ ID NO: 68255 - DNA, 1014 bp, Neisseria meningitidis; identical to SEQ ID NO: 46093

SEQ ID NO: 68256 - DNA, 1173 bp, Neisseria meningitidis
atggatttaagtatcgtagttcccatttataatgtcgagagttatttggaagcgtgtctaaattccatagaacctatattaagtaatgaaaatgtcgaacttatccttgtgaatgacgggtcaaaagacggaagtgaagatatatgttataaatatatagataaaacaacaaacaacaaacaacaaacaacaaacaacaaacaacaaacaacaaacaacaaacaacaaacaacaaacaacaaacaacaaacaacaaacaacaaacaacaaacaacaaacaacaaacaacaaacaacaaacaacaaacaacaaacaacaaacaacaaacaacaaacaacaaacaacaaacaacaaacaacaaacaacaaacaccggacaccaaatatcaaatatatatatcaggataaccaaggattgtcagaggcgagaaataccggaataaaaaattcaaacggaaaatatatagtctttattgattcggatgattttattaattgtcaggtcttgctggattttcttagtaaagatgatattgatatgccggatgtggtttttttaaatgcagttaaatatgataagggaagtgtttcatattttggcgaagattatcagcctgaaaaaatactcaatcaatccaaagtcgaagttttgaaaggattatgccgatttagaaaatttccgggttcggcgtggaataagattataaaaagagaattgattattaaagaaaaactgttttttgaaaagggaatttattctgaagatgtcgaatggtcaatgagattatttaatgcggcaacaactttttcttatttggacggttgttattactattatcggcagggaagagaagattctattacgggaactgtttcggaaaaaagtataaagtcattattatatattttggagaaaaatgcggaaatggaatttaatagggatatatcaagttatctttattcttttctttcctacgaatatctcgttttgctttttatcatgacgagtaaaaatatagcgtgtgatgctgatataaaaagaagggcgtatcatttaaggtttatgctgttaaagtccaataaattgatatataagctgatattcccgataatcacattattcggggtcgatattacaggcaggattttaaaagcaatcagggggaatatttaa

SEQ ID NO: 68257 - DNA, 450 bp, Neisseria meningitidis
atgcagactaaggcgttaggtacggtagatgaaattggcgatacagtacagcaggttgggaaacaggctagcggacaaaaaaccagcggtggtaatcctgcgattgatagcgacccctatagcccgagtagtgtggcagctcgcatagaagccggtaaggcgcgcagtgatttacaaatcaaagacattttgagcaatactactcaaaggagtaaaacaaaaggtcccgctgttcagtatgataaagtgggggattacaatgacgcactaaatgattttaatagtctgaatgttcgaaatgtacaaacacgtcctaatggaacgataacgggcaatttacctgatgggcgtgcggttaatgctcgtaatgatagtagtggtggagaaccaacacttgaaataacaattagtaataaccgaaataaaatcagatatggaaatacacgataa

SEQ ID NO: 68258 - DNA, 1056 bp, Neisseria meningitidis
atggaactcaaaatagacattgcaaccaacaacttcaaacacggcggcggcacggaacgctacacattggatttggtaaagggtctgaacagacaaaacatcacaccggccgtttatgcgacgaaatttgatcacggcattcctgaatacgccatgatcgaaccccatcttgtcgatcaacaccggacgctgaaaaaactacgctcattcctcttttcaagtcggctcgctcaaaccagaaaaaacagtgccgccaaactgattgcctgccaccacgccgattacgccgacctcctcatctgcggcggcacacacttgggctacctgcaccatatggcgcaaaaaccgaacctgctcgaccgtctcgccatacgccgcaaccgcagcaactacgccaccgccaaactgattatggcgcattcccatatgatgcggcgcgaactggtcggactgtacggcgttccccctgaaagaatccaagtgccccccccccccgcagatacggaacgcttctttccacaacccggagaaactgccgacctgcgcgccaaatacggctttgccgaccatgaaaccgttttcctgttcccatcgaccggccacacgcgcaaaggtctggaactgcttgccgactttttcgaacataccggcctgcccgtcaagcttgccgttgtcggctccccgctcccccgccctatgaaaaacgtcgtcggactgggcttctgcaccgatatgcccgaactctaccgcgccgccgactttaccattatggcatccctgtacgaacccttcgggctggtcggtgtcgaatccgtcctatgcggcacacgcgtcgtcctctccgaaaacatggcatgtgcagaggtcatgaacgaagaagccggattctttttctcacgccaaaacccggaaaccctggcgcaagccgttgcccaagccgtcagccttaaaaaacagggcggacaccgcctgtccgacccgatgcgtgcactgaactacaacccgtccctgtcgcaccacatcgaccgactgaccgacatgctggcatccgtataa

SEQ ID NO: 68259 - DNA, 1848 bp, Neisseria meningitidis
atgcacgacacccgtaccatgatgatcaaaccgaccgccctgctcctgccggctttatttttctttccgcacgcatacgcgcctgccgccgacctttccgaaaacaaggcggcgggtttcgcattgttcaaaaacaaaagccccgacaccgaatcagttaaattaaaacccaaattccccgtccgcatcgacacgcaggatagtgaaatcaaagatatggtcgaagaacacctgccgctcatcacgcagcagcaggaagaagtatcggacaaggaacagacgggcttcctcgccgaagaagcaccggacaacgttaaaaccatgctccgcagcaaaggctatttcagcagcaaagtcagcctgacggaaaaagacggagcttatacggtacacatcacaccgggcccgcgcaccaaaatcgccaacgtcggtgtcgccatcctcggcgacatcctttcagacggcaacctcgccgaatactaccgcaacgcgctggaaaactggcagcagccggtaggcagtgatttcgatcaggacagttgggaaaacagcaaaacttccgtcctcggcgcggtaacgcgcaaaggctacccgcttgccaagctcggcaacacccgggcggccgtcaaccccgataccgccaccgtcgatttgaacgtcgtcgtggacagcggccgccccatcgccttcggcgactttgaaatcaccggcacacagcgttaccccgaacaaatcgtctccggcctggcgcgcttccaaccgggcacgccctacgacctcgacctgctgctcgacttccaacaggcactcgaacaaaacgggcattattccggcgcgtccgtacaagccgacttcgaccgtctccaaggcgaccgcgtccccgtcaaagtcagcgtaaccgaggtcaaacgccacaagctcgaaaccggcatccgcctcgattcggaatacggtttgggcggcaaaatcgcctacgactattacaacctcttcaacaaaggctatatcggctcggtcgtctgggatatggacaaatacgaaaccacgcttgccgccggcatcagccagccgcgcaactatcggggcaactactggacaagcaacgtttcctacaaccgttcgaccacccaaaacctcgaaaaacgcgccttctccggcggcatctggtatgtgcgcgaccgcgcgggcatcgatgccaggctgggggcagagtttctcgcagaaggccggaaaatccccggctcggatatcgatttgggcaacagccacgccacgatgctgaccgcctcttggaaacgccagctgctcaacaacgtgctgcatcccgaaaacggccattacctcgacggcaaaatcggtacgactttgggcacattcctgtcctccaccgcgctgatccgcacctctgcccgtgcaggttatttcttcacgcccgaaaacaaaaaactcggcacgttcatcatacgcggacaagcgggttacaccgttgcccgcgacaatgccgacgttccttcagggctgatgttccgcagcggcggcgcgtcttccgtgcgcggttacgaactcgacagcatcggacttgccggcccgaacggatcggtcctgcccgaacgcgccctcctggtgggcagcctggaataccaactgccgtttacgcgcaccctttccggcgcggtgttccacgatatgggcgatgccgccgccaatttcaaacgtatgaagctgaaacacggttcgggactgggcgtgcgctggttcagcccgcttgcgccgttttccttcgacatcgcctacgggcacagcgataagaaaatccgctggcacatcagcttgggaacgcgcttctaa

SEQ ID NO: 68260 - DNA, 1647 bp, Neisseria meningitidis
atgaaacaatccgcccgaataaaaaatatggatcagacattaaaaaatacattgggcatttgcgcgcttttagccttttgttttggcgcggccatcgcatcaggttatcacttggaatatgaatacggctaccgttattctgccgtgggtgctttggcttcggttgtatttttattattattggcacgcggtttcccgcgcgtttcttcagttgttttactgatttacgtcggcacaaccgccctatatttgccggtcggctggctgtatggtgcgccgtcttatcagatagtcggttcgatattggaaagcaatcctgccgaggcgcgtgaatttgtcggcaatcttcccgggtcgctttattttgtgcaggcattatttttcatttttggcttgacagtttggagatattgtgtatcggggggggtatttgctgacgtaaaaaactataaacgccgcagcaaaatatggctgactatattattgactttgattttgtcctgcgcggtgatggataaaatcgccagcgataaagatttgcgagaacctgatgccggcctgttgttgaatattttcgacctgtattacgatttggcttccgcgccggcacaatatgccgccaagcgcgcccacattttggaagcagcaaaaaaagcgtcaacatggcatatccgtcatgttgcgcccaagtataaaaattatgttgtggttatcggtgagagcgcgcgttcggattatatgaatgtttacggtttcccattgcccgatacgccttttttgagtcagaccaaagggctgttgataaacggttaccaatcgaccgcccacgcgacgaatctttcgctgccgcagactttggggctgccgggagaaccgaacaataacatcgtcagcttggcgaagcaggcgggttttcggacggcgtggctgtctaatcaaggaatgttggggcattttgccaacgaaatttccacctatgccttacgcagcgattatccgtggtttacccaaaggggtgattatggcaaaagcgcggggttgagcgaccgccttttgttgccggcgttcaaacgggttttgataggaaatgcaggcacgaagcctcggctgattgtgatgcacctgatgggttcgcacagtgatttttgcacacgtttggataaggatgcgcggcggtttcagtatcaaactgaaaaaatatcctgctatgtttccaccatcgcgcaaaccgataaatttttagaagatacagttaagatattgaatgaaaataaagaaagctggtctttggtttacttttccgaccacggtttgatgcatgtcggtaaaggcggcgagcgaacgttgacacatggtgcgtggaagcgtcaaagctacggcgtgccgctggttaaaatttcgtccgatgacacgcggcgcgaaatgattaaagtgaggcgcagcgcgtttaattttttacgcggattcggcagttggacgggtatcgaaaccgacgagttgcccgatgacggctatgatttttgggggaatgttcccgatgtgcagggcgaaggcaataaccttgcctttatcgacggactgcccgacgaccccgcgccgtggtatgcgggaaaaggcaaatcgactaaaaatacgtctaaaaaatga

SEQ ID NO: 68261 - DNA, 573 bp, Neisseria meningitidis
atgactgatttttcttgggaaaccgccccctttggcgcaaccgtcgatcatatagtggattaacaaatcaggacaaggcgacgaagccgcagacagtacaaatagtacggcaaggcgaggcaacgacgtactggtttaaatttaatccactatatcctgcaacgctaccacaatgtacaccgtgcacaatttgaagaattggtgccgctggcgcaaaaagtggcccaagttcatgccgacacctttccggcggaaattgccgagctgcttgcctatatgcagaacgaactgctgatgcatatgatgaaagaggaaaggatgctgtttccgatgattaatcagggtgtcggccggggtgcgacgatgcccatcagcgtgatgatgcacgaacatgaagaacacgaccgcgccatcgcacggctcaaagagctgaccgataatttccaagcgcccgaaggagcctgcggaagctggacacggctttacgttttgaccaaagaaatggtggacgacttgaacgaccacattcatttggaaaacgatattctgtttgcccgcgtactcgattcttaa

SEQ ID NO: 68262 - DNA, 2382 bp, Neisseria meningitidis
atgaataaaaatattaaatctttaaatttacgggaaaaagacccgtttttaagtcgtgaaaaacagcgttatgaacatcctttgcccagtcgggaatggataatcgaattgttggagcgcaaaggtgtgccttcaaaaatcgaatcgcttgcgcgcgaactgtcgattacggaagacgagtatgtcttttttgaacgccgtctgaaggcgatggcgcgggacggtcaggttttaatcaaccgtcggggcgcggtttgcgcggcggacaaattggatttggtcaaatgccgcgtcgaggcgcataaggacggtttcggttttgccgtgccgctcacgcccgccaaagacggtgattttgttttgtatgaacgccagatgcgcggcattatgcacggcgatattgtcactgttcgtcctgccggcatggaccgtaggggccgccgcgaagggacagttctggatattgtcgaacgcgcgcaaagcaaagtggtcggccgtttctatatggataggggcgtggcgattttggagccggaagacaagcgtctgaaccaaagcatcgtattggaaccggacggcgtggcgcgtttcaaacctgaatccggtcaggtcatcgtcggcgaaattgaggtttatcctgagcaaaaccggccggcagtggcaaaaatcatcgaagttttgggcgattatgccgacagcggcatggagattgaaattgccgtgcgcaagcatcatttgccgcaccaattcagtgaagcgtgtgccaaagccgtgaaaaaaattcccgaccatgtacgcaaaagcgatttgaaaggccgcgtcgatttgcgcgacctgcctttggtaacgattgacggcgaaacggctcgagattttgacgatgcggtgtttgccgaaaaaatcggacgcaattaccgtctggtcgtggcgattgccgatgtcagccattatgtccgccccgatgacgctatcgacacggacgctcaggaacgcagcaccagtgtttacttcccgcgccgcgtgattcccatgttgccggaaaacctgtccaacggcatctgctcgctcaatcctaatgtcgagcgtttgtgtatggtgtgcgatatggttatcacttacgcgggcaatattaaagaataccgcttctaccccgccgtgatgcgctctcatgcccgcctgacctacaaccaagtttggaaatggctttcaggcggcatcgggcatccgttcaaagcccaaatcgacacgctttacaaactcttcaaaatccttcagaaaaagcgtttcgaacgcggggcggtggagtttgacagcatcgaaacccaaatgcttttcgacgacaacggtaaaattgaaaaaatcgtccccgttgtccgcaacgatgcccacaagctgattgaagaatgtatgttggcggcaaacgtttgcgcagcggattttctgttgaaaaacaagcataccgcattgttccgcaaccatttggggcccacgcccgaaaaactcgccgccttgcgcgagcagttcggtctgttggggcttcaacttggcggcggcgacaacccgtcgccgaaagactatgccgcgcttgccggacagttcaaaggcaggccggatgccgaattgctgcaagtcatgatgttgcgctccatgcaacaggcggtttacgaaccgcattgcgacggacactttggtcttgcctacgaagcatacgcccacttcacctcgcccatccgccgctatcccgacctgaccgtacaccgcgccatcaaagccgtgttgaatcagcaaacctacacgccaaaaaaagggcaggctttgggcgtgcatacctcgttctgtgagcgccgtgccgacgacgccagccgcgacgtggaaaactggctgaaaacctactatatgcgtgacaaagtcggcgaaatatttgaaggcaaaatttccggggtggcaaattttggaatatttgtcactttggacgatatccatatcgacggtctggtgcatatcagcgatttgggcgaagactatttcaacttccgccccgaaatcatggcaatcgaaggtgaacgcagtggcatccgtttcaatatgggcgacagggttgccattaaagtggcccgtgccgatttggatgatggaaaaatcgattttgtcctgattgccgaggggagcggcagagggcggaaagttaaatcatccgcgtctgccaaaccggcagggacggcggggaaagggaagccgaaaaccgccgccgggaaaaaaacggcccgaggcggcaaagtaaggggaaggggcgcgtctgccgccgcagaatcggggaaaaaggcaaagaaaccgattccgattgaagtacaaaaggtaaaaaaacggaaaggcaaatcataa

SEQ ID NO: 68263 - DNA, 2283 bp, Neisseria meningitidis
atgacggtttttcggatttgctttattatccgtttatttttgaaatatctggggtggggagacgtgttccgtcgttggtttttgccgtgttgggtcatcggcgtggcggcttcgtttgcgctgccggtcgtgccgcattggctgttttggctggcggcttttgcggtttttgctgtgtttgcaaggcgttttgcgtttgccggtctgatgctgtgcgtgttggcgggcgcggcttacggcgtattcagaacggaagcggcactgtcttcgcaatggcgggcagaagccgtttcaggcgtgcctttgacggtggaagtggcggatatgccgaggtcggacgggcggcgtgtgcagtttgcggcaaaggctgtggacagcggtggtcggacgttcgatttgctgctgtcggactacaaacggcgcgaatgggcggtcgggagcagatggcggataacggcacgtgtgcaccccgtcgtcggggagttgaacctgcgcggtttgaaccgtgaggcgtgggcattatccaacgggataggcggtgcggggacggtcggtgcggacagggttttgctgcatggcggaagcggttgggggattgcggtttggcgcagccgcatcagccgtaattggcagcaggcggatgcggacggtgggctttcagacggcatcgggctgatgcgcgcgttgagcgtgggcgaacagtcggcattgcgccccgaattatggcaggcgtttcggccgttgggactgacgcatttggtcagtatttcgggtttgcacgttacgatggtggcggtgctgtttgcgtggctggcgaaacggctgcttgcctgttccccgcgccttcccgcccggccgcgcgtgtgggttttggtggcggggtgtgcgggcgcgctgttttacgcgctgcttgccggtttttccgtgccgacgcagcgcagcgttttgatgttggcggcgtttgcgtgggcttggcgcaggggaagattgtcggcgtgggcgacgtggtggcaggcgttggcggcggtgctgctgttcgaccctttggcggtcttgggtgtggggacttggctgtctttcggtttggtggcggccctgatatgggcgtgctcggggcgtttgcacgagggaaaacggcaaactgctttgcgcgggcagtgggcggcttcggtgttgtcgctggttttgctcggttatctgtttgcttcgctgcctttaatcagccctttggtcaatgcggtggcaattccgtggttttcttgggtattgacgccgctggcgttgctgggttcggtcgtgccgtttgcgcctttgcaacagttgggggcatttttggcggaatatactttgcggtttttggtgtggcttgccgatgtgtcgcccgagtttgccgttgcctccgcacctttgccgctgttggtgttggcggtgtgtgccgctttgctgttgctgctgccgcgcggcttgggtttgcgtccgtgggcggtgttgctgttggcagggtttgtgttttaccgttcacccggcgtgccggaaaatgaggttgcggttacggtttgggatgcggggcagggtttgtcggtgtcggttcagacggcaaatcatcatcttttgtttgacaccggaacggcagcggcggcgcagatggggattgtgccgagcttgaatgcgtcgggaatcaggtatttggattatttggttttgtcgcatcacgacagcgaccacgacggcggttttcaggcagtcggcaagataccgaacagcgggatttatgccggacagccggaattttatgagggggcgcggcattgtgcggaacagcgttggcaatgggacggcgtggattttgagtttttgatgccgtctgaacgcaaaaacatcgatgataatgggaaaagttgtgttttgcgtgttgtggcgggcggtgcggcactgctggtaacgggcgatttggatacgaagggcgaggaaagcctggtcggcaagtatggaggcaacctgtacagccaggttttggttttgggacatcacggcagcaatacgtcctcgtcgggcgtgttcctcaatgccgtctcgcccgaatatgccgttgcttcaagcggttatgccaacgcctacaaacatccgaccgaagcggtgcagaaccgtgtccgcgcacacggcatcaaattgctgcgtaccgatttgtcgggcgcactgcaattcggcttgggacgcggcggcgtgaaggctcaacgtttgagagggtataaattctattggcagaaaaaaccgtttgaatga

SEQ ID NO: 68264 - DNA, 1074 bp, Neisseria meningitidis
atgcaaaataattcatacggctatgccgtgtcggtgcgcgtgggcggtaaagagcaccgccactgggagcgctacgacatcgacagcgactttttaatccctgccgacagcttcgattttgtcatcggcaggttggggccggaggcggccatacccgatttaagcggagagagctgcgaggtagtgatagacgggcaaatcgtgatgacgcagcgccacggcaaaagcaagggcggccgcgagttgagcttgagcgggcgtgatttggccggttttttggtggattgctccgcgccgcagctcaatgtaaagggcatgacggtattggatgcagccaaaaagctggccgcgccgtggccgcagattaaagcggtggtgcttaaggccgaaaacaaccccgctttggacaaaatcgacatcgagccgggcgaaaccgtatggcaggcattaacccatattgccaactcggtcgggctgtatccgtggctggagccggacggcacgttggtggtgggcggtgcggattacagcagcccgccggtggcgacattgtgttggagccgcaccgacagccgccgcaatatcgagcgcatggacattgagtgggataccgacaaccgcttttccgaggttacttttttggcgcaatcgcacggccgcagcggcgacagcgccaaacacgatttaaagtgggtgtacaaagacccgacgatgacgctgcaccgccctaaaacggtggtggtgtccgatgccgacaatttggccgcattgcaaaagcaggctaaaaagcagctggccgactggcggctggagggattgacactcacgataaccgtgggcggccataaaacccgcgacggcgtattgtggcaacctggccagcgtgtgcatgtgatcgacgacgagcacggtatcgatgcggtgttttttctgatggggcggcggtttatgctatcccgcatggatggcacgcaaaccgagctgcggctcaaagaggacggtatttggacacccgacgcttaccccaaaaggccgaggcggcgcgcaagcgcaaaggcaaacgcaaaggcgtga

SEQ ID NO: 68265 - DNA, 471 bp, Neisseria meningitidis
atgtttgtgaacgagaaagatccttatgcggctctgtttgcggggctggtgtttttgacgttgccgtttgcgttggcggtgcatgatgcctttgcgcttgcgttcggacgggcagggctgctggtgtcggtcggccggcgtggcggttgggacggtactgtttggtttgtgttcggtgtgtttgcgtttttgaacctggtcgtgtcggcaggcctgacgaagctggcgtacaaaaagatgatgcggcggcattcgcgttacgcgctgtttctgtcgggcgtggcggcttgcgcggcagcagcggtggcttggattttcgagctgttgttgggcaatgccgccttgggcgggctgcgcggggaggcggtgtcggaatatgcgtttgccgtgtggctggtggcgatgctgacgctgcccaaacacctgacgcgcgcgccggtgcagccggtggtgtttcacaggaaaaaatag

SEQ ID NO: 68266 - DNA, 903 bp, Neisseria meningitidis
atgaatccggcaatgattgagcgtcttaaggcagtcgagaatcaggcggaagcaatgggacgcggcgcacgctctgcatatcttaagcagcaggcgcaggaattgggcatcagccttgccacgctataccgcaagctggaggcggtcagcatcaagccgacgcgcaaacggcgcagcgatgcgggcaagacggagcttaaaacggaagaagccaaattgatttcggcggttttggtggaggcgatgaggcgcaacggcaagcggttgatgtcggtgcggcaggcggtggaaatgctgcgcgccaacggaaaaatcgaggcggcgcggattgatggggaaaccggggaagtcatcccgtccgtccgcactgctttccgcccgctggcaagacatcgacctcaccgcccggttatggcacatccccgccgccgacatgaagaccaaacacccctttaccgtcccactgtcggactgggcggtagaaatactccgagagctgcacacacagaccggcgacaacatccaccttttccccggcatccgcccacagcgcaaacccgcccccctcccgaccacatcagcatcaaattcgcccacaacgccatccgacgactgggctatgacggcagcacccccggcaaatccaaacacacaatgcacggattccgccacctcttcaccaacatcagcctgaccgccggaaaagacaccatcacaacagacctcgccctcggccacatcagccgcgccgccctccaacgcgccggcttctcaagcctgcaccactacctgaccgccgacagctaccgcctccaagagcggcacgaactcgccgaatggtacagccgccgccaccgccaagcatacgaagccgccgcccaaaacacttgcaataaaacctaa

SEQ ID NO: 68267 - DNA, 747 bp, Neisseria meningitidis
atggttttgcgcagagattttttagcctggtgcgacgaaacgttgcagacggcatcgtttaaagattacgcccccaatggtttgcaggttgaagggagggaatatatcgggaaaatcgttacgtcggtaacggcaagcagggcagcgattgattttgctgtggagcagaaggcagatttgcttttggtacatcacggtatgttctggaaaaacgagttgccgaccgttactggttggaaaaagaggattgccgcactgttacggcacgacatcaatatggcaggctaccatctgcccctggatgcacatcccacactgggcaacaatgcccaactcgccgacagattgggttttgcgacagaaaaacggttcggcgaacaaaacctgctcaactcgggcagcctgaaacaagccaagacactcggcgcattggcggcgcatattgaaacagttttgcaacgtaagcctgtcgtcatcggcaaacccgaacgcgaaatccgacgggttgcatggtgcagcggcggggcgcaggggttttttcagacggcaatagacgaaggtgtcgatctgtatttgacgggggaaatctctgaagcccaataccaccttgccaatgaaacgggtacggctttcatttcggcagggcatcacgcgacggaacgttacggcgtacgcgcgctggcagaatcggcggcagaggttttcgggttggaagtgtgccattttgacgaaaacaatccggcttga

SEQ ID NO: 68268 - DNA, 1770 bp, Neisseria meningitidis
atgattccatccgacttcattgacgagcttttagccaaaaccgatattgtcgatattatcgacgagcaggttccgctgaaaaaaggcggggcgaactatatggcgtgttgcccgttccacaaggaaaaaacgccgtcgttttcggtcagtccgaccaaacagttttaccactgtttcagttgcggggcgcacggttcggcgattggttttgtgatggaacatcaggggctgtcgtttccggaggcggtgcagttccttgccgaccgcgtgggtatgattgtgcctaaagtgcgcgggcaaaacgataatcccgaagtccgtgccgagcgcaagaaaaaacagcagacgctggaggaaacgacggctgcggcagctgatttttatgcgcaacagctaaaattcaatccggcggcaaaagcctatttggacaagcgcggcttgagcgcggaagtcatcgcgcattatggtttgggctacgcgcccgacggctggcagcctttgacgcaagtgttccaaccgtatcctaataccgcgttagtggatacggggatggtgattgacaatgaggggcggtattacgaccgattccgtcatcggattatgttccccatccgcaatccgcgcgggcaggtcatcggtttcggcggcagggtgctggacgactccaaacccaaatatctaaactctcccgatacgcctttgtttgataaggggaaaaacctttacggattgtatgaagggcgtgctgctgtcaaggaagtggggcggattctggtggtcgaaggctatatggacgtggtcgcgctggcacagttcggcgtgggctacggcgtggcggccttgggcacggcaacaacagcggaacacgtcaaaatcctgatgcgtcaggcggacagtatttatttctgtttcgacggtgacagcgcggggcgcaaagcggcttggcgcgcgctggaaaacgcgctgccgcaattgaaggacgacaaatcgctgcattttttgttcctgccggaagaacacgaccccgacagttacatccgtgcctacggcaaagcgcaatttgaagacgcgctgttgaatcaaagcaagcctttgtcggagtatttctgggaacacctttcagacggcattcatctcaatacgcaggaaggcaaggcggaattggtaaaaaccagttcgccgcttttggcgcagattaccgcgccggcattggcttatttgttaaaacaacggcttagcgaactggtcggcatcgaccccgacaacctcgcgcaactgctcggacaggaagcgccaaagcggcacgtcaaacaaaactacaaactgcctccgatttccgtcaaacagcccgttatgccgacattggtgcaacggcaaatccgcagcctcttgataaatccggattgggctgcatatatagacctgcccgattatctggcgttggacggcgatttcgcctgccttgccaacctcgccgaaaccattaaaaaccatccttccgtgccggcaaccgcacaggttttggaacatatgcgcggttcgccctacgaagaaacaatcaaccgcatcttccggtcggcccttcaatcggaagaaatggaaggcggcggcgaagaagattgcgaaaacttccaaatcggcatcaaaaaactgctcaatgagttaaaatacagccaaatcgaaacattaaaacaaaaaagcctgcaatccggcttaaatgaaagcgagaaaaaacttttgctgtcgctgctgaccgcaaaacaaaattga

SEQ ID NO: 68269 - DNA, 2583 bp, Neisseria meningitidis
atgaaaaatcaatatagtaaatcattgcatggcgtgttttaccttgccttctatgataaaatacacgcattttttgcagagcagttgtttcaactcatcataaatatgaacaaaaaacccacctacatcagtttatttagcagtgcaggcgttggttgctatggttttaaaaccaatggttttgaatgcgtagcaaccaacgaacttttagaaaaacgcctaaaaatccaaaaatataatcaaaaatgccgctttgattcaggttatattgctggcgatattaccctgcctgaaacccaagccaaactgtttgccgaaattcgacgctggaatactgaaattgatgttgtgattgctacaccgccttgccaaggaatgtcggttgccaaccataaaaaaaataatgaaatggcaagaaattctttggtcgtggaatcaatcaaaatcgttcgggaagttcagcccaagttttttatttttgaaaacgtcaaagcctttttaaatacaccctgcaccgataccgatcatcaagaaaagccgattgaggaagccatttggtcaaatttgggcggacattacaacattctatccaatgtactaaattttaaagattatggtgcaaattccagtcgtaccagaacgctggtgattggcgtgcgaaaagatattcatcacattacgccgtacgatattttccccaagcaaacaccgccaaaaaccttgcgtacattgctggctgacctgccgcctttaatgcaaatgggcgaaattagcgatgatgatatttaccatagctatcgtgaatttgatccccgtatgttgccgtggattgcacagcttaaagaaggcgagtcagctttccaaaatactgatcctgcacgcattccccatcaaattaaaaatggtgaaattatctacaatcaaaacaaaaatggagacaaatacgcccgttggtttttagatcgtgagggtccgtgcattcatacccgtaatgacattttagccagccaaaacaccatccaccccactgaaaaccgtgtattttccgtgcgtgaactcatgcgtatgatgtcaattccgccatcatttaaatggacggcacaagatgaaaaacagcttaatgcactgtcatttgatgagaaaaaaacctttttgaaaaaagaagagctgaatatccgccattgtatcggtgaatctgtgccaaccgctgttttggccaatgtcgcacaaaacattcaggcagccttgcaacagtccgaactgtcaatgacggaaattcaaaatttaatcaaacgagaaaatttatcccttgccgataatctctaccgatttattgagcaacattttgacgcatatccattcagtcggcttttgcaaattgctgaatacgctaatgctgcccgtagcgaaacggctgcttattttacccgtattgatattgctttcggactggttaatgctcttcctgatttcaaaaagaaaaacttacggattttagaaccctctgtcggcattggtaatttcattccactactggcaaaaaaatatgcagacaaagaaaaagttatttttgatttggtggatattgactcaaacagtttaaatctcctgtcattgctgctgaaaaaattaaatttaggcagtaaatttgagttcaatattattcatcaggattttttaaccgcaacgctgcctgaaaactatgatctagtcatcggcaatccaccatacggcaaagttaaggcaagtgataaaaatttggcactataccgtaaaaatgctaccaataaagatacgcaaaatattttttcattttttattgataaggctctgacgctcagtaaaaccgtggctttggttgttcccaaaagtgtgattaacgcccccgagtttcaaataacccgacaacaacttatcacagccaatatcaaccgcattattgattacggcgagaaagcatttaaaggcgtaaaaatagagacgattgcctttattgccgatcaaaccgacaaagacaatcaacatattacgatagaaagccatatccaagaaacgttgatacaaaactgtaaaaactatttttttgataattttccctattggttgatttatcgtaatagtgaatttgatcaaattgcacaaaaattggaatttaatgtatttcaatcattccgagatcgccaaattaccaaagcgcatacacagaatagtggcaatgttcgggttttaaaatcccgtaatatcggtaacaacgagattattgatattgagggttatgatagttatgtggattcagttgcccctttttctgtcggcaaatttattaaccgtaaaaatgtcgtgatgattcccaatctgacttacaaacctcgggcagcatttttgcctgaaaacagtattgctgatggctcggttgccctactgacaatgaaaaaacacgaaaaaatcctaacccaacgagatctcgcatactatgcaactcccgaatttgagcagttttaccgtgttgcccgtaattatggttctcgttcaatgaatatagacaatcattctgtgttttttttcggattgctaaaagattag

SEQ ID NO: 68270 - DNA, 578 bp, Neisseria meningitidis
atggcagagttcgcaacgattgccagaccttatgcaaaggcattgttcggtctggctcaggaaaaaaaccaaattgagtcttggttgggcggactggaaaaacttgcggcggttgttcaggaagggaaggtggcttcattgattgaccgtcctgaaacgaatgcttcagaaaaagcagatatcctcatcgatttggtcggtttgaaagacaaggagttgaaaaactttgttatcgtcttggccgggcagaaacgtttgtcgatattgccggaagtatatgctcaatatcaagacttgaccttatcattcaaccatatcaaatctgccatcatttacagtgcctatccgttgaccgacaaacaggtcggcgagttggcgcaaatgctgaataagcgtttcgacagcgagctgaaaatctctgtcgaaatcgaaccggagctgattggcggcataaaagttgaagtgggtgatcaggttttggatttgtctgtacaacgcaaattgagtgccttgtacacgactatgacgaattaggagagttttcatgcagcttaatcctgctgaaattagcgatttga

SEQ ID NO: 68271 - DNA, 873 bp, Neisseria meningitidis
gtgaaaggactcgactattgccgccaaaaagcagaagaaagccgctccagttttttgtcgggcttccgtttcctgactcaggaaaaacgggatgcggtaacggttttatatgctttttgccgcgaattggacgatgtggttgacgaatgttccaaccccgatgttgcacaggcgacattgaactggtggcgcggcgatttggacaaggtattcggcggcgcgatgccggaacaccccgtcaatcaggccttgcggcaagttaaggaaaccttcaagctgccgaaatatgaactggaagccttaatcgacgggatgcagatggatttgcttcgggtgcgttacggcagttttgaagaattaaaactgtattgccgccgcgtcgcgggcgtggtcggctgcctgattgcgcggattttggggttttcagacgaccaaacgctggaatacgccgacaagatgggacttgcgctgcaactgaccaacatcatccgcgatgtcggcgaagacgcgcgcaggggacggatttacctgccgatggaggaaatgcggcggtttgatgtccccgcaagcgtgattttgcaatgcagcccgacgggcaattttgccgaattgatggcgttccaaatcaaacgcgcccgtgaaacctaccgcgaagccgtatcgctgctgcctgctgccgataaaaaagcccaaaaagtcggactggttatggcggcggtttattacgagctattgaacgaaatcgaccgggacggcgcacaaaacgtcctcaaatacaaaatcgccctcccttcgccgcgcaaaaaacgcattgccctgaaaacctggttattcggattcaaaccgcgccccggcacgccggaacgggcataa

SEQ ID NO: 68272 - DNA, 1287 bp, Neisseria meningitidis
atgagcgcaatcgttgatattttcgcccgcgaaattttggactcacgcggcaaccccacagtcgagtgtgatgtattgctcgaatccggcgtaatgggacgcgcagccgtaccgagcggcgcgtccaccggtcaaaaagaggctttggaacttcgcgacggcgacaaatcccgttattcgggcaagggcgtattgaaggcggtcgaacacgtcaacaaccaaatcgcccaagccctcattggtatcgatgccaacgagcaatcttatatcgaccaaatcatgatcgaattggacggtactgaaaacaaaggcaatttgggtgcgaatgcgactttggcggtttctatggcggttgcacgcgccgctgccgaagactcaggcctgccgctttaccgctacttgggcggcgcaggcccgatgtccctgcccgtaccgatgatgaacgtcatcaacggcggcgaacacgccaacaacagcctgaacatccaagagtttatgattatgcccgtcggcgcaaaatctttccgcgaagcgttgcgctgcggtgcggaaattttccacgccttgaaaaaactgtgcgacagcaaaggcttcccgaccacagtcggcgacgaaggcggtttcgcccccaacctgaacagccacaaagaagccctgcaactgatggtcgaggcgaccgaagccgccggctacaaagcgggcgaagacgtattattcgcattggactgcgcgtccagcgagttctacaaagacggcaaataccacttggaagccgaaggccgctcctacaccaacgcggaatttgccgaatatctggaaggcctggtcaacgagttccccatcatctccatcgaagacgggatggatgaaaacgactgggaaggctggaaactgctgaccgaaaaactgggcggcaaagtccaactcgttggcgacgatctcttcgttaccaacccgaaaatccttgccgaaggcattgaaaaaggcgtggcaaacgcactattggtcaaagtcaaccaaatcggtactttgagtgaaaccctgaaagccgtcgacttagccaaacgcaaccgctacgccagcgtaatgagccaccgctccggcgaaaccgaagacagcaccattgccgacttggcagtcgccaccaactgtatgcagatcaaaaccggttctttgagccgttccgaccgcatggcgaaatacaaccaactgctgcgtatcgaggaagaattggcggaagccgccgactaccccagcaaagccgcattctaccaactgggcaaataa

SEQ ID NO: 68273 - DNA, 1236 bp, Neisseria meningitidis
gtgattgcatcgctgacgggcgcggccgtgggcggcacgccggtagatgcgcaaaccggaggtgcggtcggacagaatgcggtggaaaacaacctctatctgacatcggaagccttaaagaaggacaagcagacagctcgtaaaatttattccgtcataaaagagcaagtcaagcatgaatgcagttccacaggaagaattaccgaatgtcgtcaaaatataggacgcattatcgaatttacccaagacaaacgctttgacagtaggtttaaggactaaaaagaatccttatattacctaaataaacatcctgatttagtagcctcttatttgaaggctgaatacgaaaagctggatagggaagacaaaagtatcctgcaccgctacatctcacccggggctgaaatcgtttcgggcagtttgggggttgttctttcaggagtagccggaggcggatcttgtgccgagactttcggcttaggctgtgccgccgctttggttggtgtaacgtcttcctacgatcatgtcattactgggacgaaaaacttcggaaaaaaagccagcgagcaacgaccgacgattgcggttcaggccttgaagcagttggggctgtcggagcaggctgcggaatatgttcagttctctatagatttgttcagtgtgggtaaatcggggggcggtatacctaaggctaagcctgtgtttgatgcgaaaccgagatgggaggttgataggaagcttaataaattgacaactcgtgagcaggtggagaaaaatgttcaggaaacgagaagaaggagtcagagtagtcagtttaaagcccatgcgcaacgagaatgggaaaataaaacagggttagattttaatcattttataggtggtgatatcaataagaaaggcacagtaacaggagggcatagtctaacccgtggtgatgtacgggtgatacaacaaacctcggcacctgataaacatggggtttatcaagcgacagtggaaattaaaaagcctgatggaagttgggaggtgaaaacgaaaaaaggtgggaaagtgatgaccaagcacaccatgttcccaaaagattgggatgaggctagaattagggctgaagttacttcggcttgggaaagtagaataatgcttaaggataataaatggcagggtacaagtaaatcgggtattaaaatagaaggatttaccgaacctaatagaacagcatatcccatttatgaatag

SEQ ID NO: 68274 - DNA, 828 bp, Neisseria meningitidis
atggcacattacgcaatcggcgacatacaaggctgtttcgacgaactgaccgcgctgctcggcaaaatcggtttcaaccacggcacggacaccctctggctgacgggcgacatcgtcaaccgcggcccgaaatccctcgaaacgctgcaattctgcatccggcacgaaaacagcgtgcaaatcgtcctcggcaaccacgacctgcacctgctcgctgtcggctgcggtgaaggcgcgcccaaacgcagcgacacaatcgaacccatactcaaacaccccgacggaaaaaaatgctcgactggctgcgcgcgcaaccgctgttgatacgcgagggcagccgcgtgatggtacacgccggcatcctgccgcaatggcgcatcgccaaagccgaatcgctcgctagagaagccgaagccgaactgcgcggcaaaaaatacgtcaaattcttctccaaaatgtacggcaacaaaccggccgcgtgggacgaaggtttggaaggctatgcccgcctgcgcttcatcgtcaacgccttcacgcggatgcgcgccctgacctttaaaaacgaactggatttcgactacaaatccacagtgaaaaaaatgccgccttacctgcgcccgtggttcaaagcccccgaccggcaaaacctcgagcaccatcatcttcggacactggtcctcgctgggctacacgaatgccgacaacgtcatctcgctggacaccggcgcgctgtggggcggacagctgaccgccgtcaacctcgaaacggaagaaattacccaagtccaagccgccggcggcatagactggaaaagcttcgcaaaataa

SEQ ID NO: 68275 - DNA, 648 bp, Neisseria meningitidis
atgccgtctgaaccgccttcagacggcattgcccgacaccccaaaagcacaatcaaaatcaaaaaaccgaacaaacccttcaggctgacccccaaactcctgatacgtgtcgtattgctcatctgtatcaccgccatcggcgcattggcaataggcatcgtcagcacattcaacccgaacggcggcaaaaccctccaaaccgaaccgcaacacaccgacagcccccgcgaaaccgaattctggctgccaaacggcgtagtcggacaagatgccgcccaacccgaacaccaccacgccgcctcatccgaacccgcacagccggacggcacagacgaaagcggcagcggactgccgtcccctgccgcacccaagaaaaaccgggtcaaaccgcaacctgccgacacagctcaaaccgacaggcagccggacgacgccggaacacaagctgaaaacacactcaaagaaacccccgtactgcccacaaacgtcccccgtcccgaaccccgaaaagaaacacccgaaaaacaggcgcagcccaaagaaacacccaaagaaaaagaaacgcccaaagaaaaccataccaaaccggacaccccgaaaaacacgccgcccaaaccccataaagaaattctcgacaacctcttctga

SEQ ID NO: 68276 - DNA, 207 bp, Neisseria meningitidis; identical to SEQ ID NO: 64282

SEQ ID NO: 68277 - DNA, 408 bp, Neisseria meningitidis
atgacaacttataccattccaaaagattatcaatttctgtatatatatgagggcactctattaaactatactttgaaaaacgatgaattccatatcatcgtccagaatgtggattatccggactttcctcaagagattcctacaccaaattatacagactgggtaaaaattaaattcaagcagttcagctatctgaaatttatctatggatacgccacgaagaaccaagataaaaatatcaaaaatgtattggaacttggagaattaaagcaggatgatgaaatcttggattatggaggtgcgctggaagtgataggcagtaggtatgatcttccgaccggttttagtatagatatagtttgccgggaaatagagttagaatttttagatcaggagagtttcaattaa

SEQ ID NO: 68278 - DNA, 195 bp, Neisseria meningitidis
atgccgtctgaaaaccgcagcgcggggtttgtggtgcattatgccgtattgcaggacaaggcacagggcagggcggcggggtgcatcgtagcaactgtatttttgcccgacggggtgaaaaatacagttgctacacccactgataatgaaaaaagagagcaatgccgtctgaaccgcgtgttgcggcgagcataa

SEQ ID NO: 68279 - DNA, 483 bp, Neisseria meningitidis
atgaaataccggttttaccgcaatggcggcacttacttttttacggttgtagccaataaacggcagaagattttgaccgatgatgcggtgcgtttggctttacggcaggcggtaatggcggtgcgcgaacggtatccgtttgaaattttggcatgggtgttgatgcccgatcatctgcataccatatggcggctgccggacaatgattctgcttattcggaacgctggcggcaacggcacagccaatatttaatcggcggcaatctcaggctttggcaaaaacgcttttgggaacatactatccgcgatgaggccgatttttcctgccattttgattatctgcatttcaatccggtcaaacatggctatgtaggacaaatttccgattggcggttttctacgtttcaccgttatgtcaaacagggtatttatccgcataattggggtggcggcaatgcggacttttctattgaatacgattaa

SEQ ID NO: 68280 - DNA, 495 bp, Neisseria meningitidis
gtgaaagatagtttaatggacgcctttgatttttttatgcaaggcaattttaaaaaaattgcaactgaacaaggtttagaccgtaaatattttatattccaatatatcgtatgtaatttatctgccatttcttctttttgtctaatgaagattattcatacttatactattctctatattaatggctttctcttgagaagcaaggttctatctatagtaaaaaataaacaaaagtttttatctgacatgtttcccttggaaatgcctttcttttttgtagaatacaaaatacctatcttggctagattcttgaataggggaatgaaatggctttatctcccaagttttttctgtttagttgcgatttgtttctcaatatatatccttaatgaagaaggggggtggatgccttattttgcctgctattggtttggactttgttatccagtaagcacttattacgtttttttatccagagattataaacatatctaa

SEQ ID NO: 68281 - DNA, 807 bp, Neisseria meningitidis
gtttttacatgtgccatgattgccctgaccggtactgccgccgctgcacaagagcttcaaaccgctaatgagtttaccgtccacaccgacctctcttccatttcttcaactcgtgctttcctgaaagaaaaacacaaagctgccaaacacatcggcgtacgtgctgatattccttttgatgccaaccaaggcatccgcttggaagccggtttcgggcgcagcaaaaaaaatattattaatttggaaacagatgagaacaagctgggtaagactaaaaatgtaaaactgcccaccggcgttcctgaaaaccgtatcgatctttacacaggctacacctacacccaaacgttaagtgattctttaaatttccgtgtgggtgccggcttgggttttgaatcttcaaaagacagcattaaaaccaccaagcatacgcttcacagcagccgtcagtcgtggttagccaaagttcacgcggatttgctttcccaactgggtaacggctggtatatcaacccttggtctgaagtgaaatttgacctcaattcccgctataaattaaacaccggcgttaccaatctcaaaaaagacatcaatcaaaaaaccaacggctggggctttggattgggtgcaaatattggtaaaaaactgggcgaatccgccagcatcgaggcggggccgttctacaaacaacgcacttacaaagaatccggcgagtttagtgtaacaaccaagagtggcgacgtatcgctcaccatcccgaaaaccagtattcgtgaatacggcttgcgcgtcggcataaaattctga

SEQ ID NO: 68282 - DNA, 369 bp, Neisseria meningitidis
atgagattttatattgataacaaagagtgtgattatattttttttcggaaggctgttaatataagtgatgactttatacaaagtggttttattactccggaaggattaattactaaaaatagtaatccaaaattatttaatcaatattcaaaaatggtatcaaataaatgtcaatatgagatggttacatttctttcggatgaaatgaaaaatattattgaattattatcgaatgatgatgcatatatagagtttgcctattctgaggatttttatgtactccctgagattgaaattgataagagaactttaaaatcactaaatttctatattgacttcggggttaaatatataattaataaaatatag

SEQ ID NO: 68283 - DNA, 471 bp, Neisseria meningitidis
atgaaaaaacaaatcactgaagccacgatgatgctgtctataatcgccccaatggcaaacggcttggacaatcaggcatttgaagaccaagtgttccacacgcgggcagatgcgccgatgcagttggcggagctttctcaaaaggagatgaaggagactgagggggcgtttcttcctattgtggcaggtgctttgatgggaggggcaattagtgcttgggctaatcacggcatttctaaaattaaaacagggcaatttgcttcaacaagaagtaccttggctgcaaccgctggtggtatgataggcggcggatatagcagtgcgatgttgcgcggtgcagggattactactagtgtttttgcccgttctgcttggaaagggggaaatgctattcctaatgcagttattcgtgcaaatggtgcagcattaaatcagtcttctagcgccgcaatgggaaaacatagaagataa

SEQ ID NO: 68284 - DNA, 1302 bp, Neisseria meningitidis
atgtggacgggatttttttcaaaatcaggcactggcattgcagaggaaaggcatcaaaaccgccgtgcttgcaccgatgttccgctacttgcggaaagaaacagcaagcatcctgaccgacccttacggttttgcaaaatatagtggattaaatttaaaccagtacagcgttgcctcgccttgccgtactatctgtactgtctgcggcttcgtcgccttgtcctgatttttgttaatccactatatcggcaaagcggtttggacatctatgcatggcacggcatgtatttcttcccccgctttccgttcatccacatcgaccgcatccgctgggtgtgtgcgggtttgaaagctttcaaacactacatccgcgaaaacgggctgcccgacctgattcacgcccactgtatgaactatgccggcatacttgccttcaagatttcccaaaaatacggcatcccctatgtcgtcacggaacacagcagcaccattacgcgcggtttggtgcgcccgcaccaatggcagcctatgaaaaatgcggcggcacacgccgccgcacgtctcgccgtcagccgccatttcgcacacgtcctgcaacacaaatacggctgcgaatggcagtacctccccaacatactgggcggaatattcaaccgaccgtttgaacaaagagaaaaaaacaacaaaccgcatttcgtgttctgcaccgtctcgcaccttcgccgtctcaaaggacacgatgtcctactcactgcctttgcccgggcgttggcacaatgcccgcaactgcgcctgaacatcggcggcagcggacaggaagaacagcggctgaaacagcaggcggcagacttgggcatcacccatgccgttacatttttgggcgcactgcaacccgaagcagtcttggatttgatgaggaacagcgacgcattcgtccttgccagccgcaccgaaaccttcggcgtggtctatatcgaagcactgtcccaaggattgcccgtcattgcaacacgctgcggcggtgcggaatctattgtttcagacggcaacggatatttggttcctgttgacgacgacgatgcccttgccgacgcactcatcaaaatgtatgaacaccactctgattttgaacctgcccgacttagggaaaactgtctgaacgaatttggcgaaaatgccgttataggcaggttgatcggcattttccgacaggcaatcgcagaatacggtaagaaaataccggtgaaatatagtggattaacaaaaatcaggacaaggcgacgaagccgcagacagtacaaa

SEQ ID NO: 68285 - DNA, 348 bp, Neisseria meningitidis
gtgtttgctgttattttcttttcgacattgggctatattttagcatggataagagatattcctaaaataaaatcaaaaaaaattttggcaagatccttatatattataggaataataaatgtaataatcggctatgtattaattaaaaatatattggtttctgtttcggatggaggtggaataaaatatgttgcaatatatttatcaaattttttttggacagtattgatgtatgttcttgtgaaaagattatctaaaaagccaagcttaaacccagtacacaactcatcaataaaaatcccttttgcacggaacaatgacaatattcaaattgctggatttgcaatc

SEQ ID NO: 68286 - DNA, 2154 bp, Neisseria meningitidis
atgcctgtccctcaacccaccgcaccttacgaccctctgaccgccgaagcgcgtaccctgcttttccatacagcctcctacctcaagcccgaggaacaggcggagcttgaaaaagccgtcgcctatgcgtttcgcgcccacgacgggcaaacccgcaaaagtggcgaaccatacattacgcatccgattgccgttgcgacacagcttgcggtttggcatatggacgtacagggtctttgtgcaggtgtaatgcacgacgtattggaagatacgggcgtgacaaaaggggaaatggcggcggtgttcggcaatacgattgccgagatggtggacgggctgtccaaactcgaaaaactcaaatttgaagatcatgcggaacatcaggcggagagtttccgcaaactgattttggcgatgaccaaagatgtgcgcgtcatcgtcgtcaaacttgccgaccgcctgcacaatatgcggacgctcggttcgatgcgcccggacaaacgccgccggattgcaagggaaacccttgaaatctatgcacagattgccaaccgtataggtttgaataacgcatatcaagagcttcaggatttatcgttccaaaacctgcatcccaaccgctacgagactttaaaaaagatggacaagagccggaagaaccggcaggacgttgtcggcaaagtcttgcgcgcattcggccagcggctggtaggcgcgaatatagaggccaaaatcaaaggcagggaaaaaaacctgtacggcatccatcagaaaatgatggcgaaaaagctgcgctttgccgaggttatggatatttacggtttccgcgtcattgtcaacagcattccagcctgttatgccgcactcggcgcattgcacaccctctatcagcccaagcccgggcggttcaaagactatatcgccattccgaaaagcaacgggtatcaaagtctgcatacgactttggtcggcccttacggcttgccgattgaagttcagatacgtaccaaggaaatggatgctgttgccgaaggtggaatcgccggacattggagctataaatcatattctaagatggtcgatcaggcggtgcttcacacaaaccggtggctgaaaaatatcttagatttgcaggcaagcagtgccaatgccattgagtttctcgaacacgtcaaagtcgatttgtttccgaacgaaatctacatccttacgccaaaaggaaaaatcctaactttgcccaaaggggcaacgcctgtcgattttgcttatgcggtgcataccgatatcgggcacaaaaccgttgccgcacgtatcaacaatatcatgatgccgttgcgtacgaagctcaaaaccggcgattccgtcgaaattattacatccgaacatgccaaacccaatcctgcatggttgaatttcgccgtgtcaggcagggcgcgcagtgccatacgccaatatattaaaaaccttaaccggcacgatgcggtcgttttgggagagagcctcttacaaaaagccctgtccagtttgctgcccaaagatgtcctgctttcagacggcattaaagaaaaataccttgccgatctcaacgacaaacagacttcatttgaggaagtgctgtacaacgtcggtatggggcataccctgcctgtttatgtcgccatgcacattgccgagttggcaggggagcatttcggcagcgaggtcaggctcagttccattaaagttgatggtcaggaaagcgggcatattcattttgcagagtgctgccatccggttcccggcgattccatccgtttgctgttggttaagggaaaaggcatgattatccatagggatacctgcccgacgttgttaaagtccgatcccgaacagcagctggatgcagactgggaaaatatgaacgggcagaactaccgtgtcgggcttcaagtccaatcggaagacagccacggcttgctggcattaatggcgcaagcgatttccgattccggtgcggacattgagtcggtcgaaacaccgtctaaatcccagtcgggaacggaaggttttgtcgaattcaaattcttattgaaagtcaagaatctgaatcaattgaatcagattattcaaaatctgcatagtattccatatatccgcaaagtcatcagaagttga

SEQ ID NO: 68287 - DNA, 1125 bp, Neisseria meningitidis
ctaccccgaaactttatccaccgcccgcaaagctggttcaaatgggacaaagacaacgggctgctgctgcgtacccgcgaaaatccggaaggcgaagcgttgtggccgctgggctgggtcgttcatacccaaaaatcgcgcagcgtccagcaggcgcgcaacgggcttttccgcacgctttcctggctgtatatgttcaaacactacgccgtccacgattttgccgagtttttggagctgtacggcatgcccatccgtatcggcaaatacggcgcgggcgcaaccaaagaggaaaacaccctgcttcgagcggtggcggaaatcggtcacaacgcggcaggcatcatgccagaaggtatggaaatcgagctgcacaacgctgcaagcggtacgatggcaaccagcaatccgtttttgcagatggccgactggtgcgaaaaatcggcggcgcggctgattttggggcaaacgctaaccagcggtgcggacggaaaatccagcaccaacgcgctgggcaatatccacaacgaggtacgccgcgatttgctggtgtcggacgcaaaacaggtggcgcaaaccatcacaagccaaatcatcggaccgttcctgcaaatcaactatcccaatgccgacccaaaccgcgtgccgaaatttgaatttgacacgcgcgagccgaaagacatcgcggtctttgccgacgctatcccgaaactggtggatgtcggcgtacaaatccccgaaagctgggtgcgcgacaaactggtcattccagatgtgcaggagggtgaggctgtgttggtgcggcaggtaccggacaatccggtaaacagaactgcattggcggctttatccgcccacaccgtaccatctaaggctacgggcaggcatcaggaaatattggacggcgcgttggatgacgcgctggttgagcccgatttcaattctcagctcaacccgatggtgcgtcaggcggttgcagcacttaatgcttgcaacagctacgaggaggcagatgccgcactgaatgcgctttatccgaatttggacaacgcgaaactgcgtacctatatgcagcaggccttgtttatcagcgatattttgggacaagaccatgcccgcgcctga

SEQ ID NO: 68288 - DNA, 426 bp, Neisseria meningitidis
atgtctgaaccgattattacccctgccgccgtttatacttttggcggcgtggtcggcgcaggttatctgttggggatgcctgtcgatgcagtcgtgctgggcgcagtggcttcggcggcggtaacgatgataagcgagccgaaaagccgctggatggtagtggcctatatcgttatcggcgggcttttgggtggcgcttttgccccaccgctgacgcatttcttaatcggcgaagtagttggcagccatccgtcgctgggtgagcagcgcatacagtttgcacatgcctttgcccccgtcgttgtcggcttgttgtggcaggtattgttgagatttgcccgcgctgtctggccatcgttcgaaaagcatgcagacgatattgtggagtggctgctgaatcttctgccgtggagaccgaaaaaatga

SEQ ID NO: 68289 - DNA, 276 bp, Neisseria meningitidis
atgaaattacttttgattctttctgccgccccatcactgatttcggcgtacttgatgatttgtcgtctgaacgggcgcaaatggagtgcattgtcgccggaggcgtgggcgtatctcgcctttttaggtggagcgatctataccttttacatagtttttgcttacggactgacgccgagcttaggcaaatttatgatggatattgccgcctgtgtatatttcggcagccgttcggtacgggttgtcaaatggcggcatcggcatggtttgaaatag

SEQ ID NO: 68290 - DNA, 1389 bp, Neisseria meningitidis
atgaccccttccgcactgaaaaaaaccgtcctgctgctcggcactgcctttgccgccgcatccgcacaagcctccggctaccacttcggcacacagtcggtcaacgcgcaaagcacggcaaatgccgccgccgcagaagccgccgacgcatcgaccatcttctacaaccctgccggcctgaccaaactcgacagcagccagatttccgtcaacgccaacatcgtgctgcccagcattcattatgaggcggattccgccaccgactttaccgggcttcccgtccaaggttcgaaaagcggcaaaatcaccaaaaccacggtcgcgccccacatctacggcgcatacaaagtcaacgacaatctgaccgtaggcttgggcgtgtacgtccccttcggttctgccaccgaatacgaaaaagattccgtgttgcgccacaacatcaacaaactcggtctgaccagcatcgccgtcgaacctgtcgccgcgtggaaactcaacgaacgccattccttcggcgcaggcatcatcgcccaacatacttccgccgagctgcgcaaatatgccgactgggggattatggaaaaagcgaaagcactaaaagaaacaccccccaatccaactaaagccgcccaaatcaaagccgacggacacgccgatgtcaaaggcagcgattggggcttcggctaccaactggcgtggatgtgggacatcaacgaccgcgcgcgcgtgggcgtgaactaccgttccaaagtctcgcacacgctcaaaggcgatgccgaatgggcggcagacggcgcggcggcgaaagcaatgtggagtacgatgcttgcagcaaacggctacacggcgaatgaaaaagcccgcgttaaaatcgttacgcctgagtctttgtccgtacacggtatgtacaaagtgtccgataaagccgacctgttcggcgacgtaacttggacgcgccacagccgcttcgataaggcggaactggtttttgaaaaagaaaaaaccatcgtcaacggcaaatccgaccgcaccaccatcaccaactggcgcaacacctacaaagtcggcttcggcggttcttatcaaatcagcgaaccgctgcaactgcgcgccggcatcgcttttgacaaatcgcccgtccgcaacgccgactaccgcatgaacagcctgcccgacggcaaccgcatctggttctccgccggcatgaaataccatatcggcaaaaaccacgtcgtcgatgccgcctacacccacatccacatcaacgacaccagctaccgcacggcgaaggcaagcggcaacgatgtggacagcaaaggcgcgtcttccgcacgtttcaaaaaccacgccgacatcatcggcctgcaatacacctacaaattcaaataa

SEQ ID NO: 68291 - DNA, 2142 bp, Neisseria meningitidis
atgaacgccccgtttttccgcctcagcctgctctcgcttaccctggcggcaggttttgcccatgcggcagaaaataatgccaatgtcgcattggataccgttaccgtaaaaggcgaccgccaaggcagcaaaatccgtaccaacatcgttacgcttcaacaaaaagacgaaagcaccgcaaccgatatgcgcgaactcttaaaagaagagccctccatcgatttcggcggcggcaacggcacgtcccaattcctgacgctgcgcggtatgggtcagaactctgtcgacatcaaggtggacaacgcctattccgacagccaaatcctttaccaccaaggcagatttattgtcgatcccgctttggttaaagtcgtttccgtacaaaaaggcgcgggttccgcctctgccggtatcggcgcaaccaacggcgcgattatcgccaaaaccgtcgatgcccaagacctgctcaaaggcttggataaaaactggggcgtgcgcctcaacagcggctttgccagcaacgaaggcgtaagctacggcgcaagcgtattcggaaaagagggcaacttcgacggtttgttctcttacaaccgcaacgatgaaaaagattacgaagccggcaaaggtttccgcaatgtcaacggcggcaaaaccgtaccgtacagcgcgctggacaaacgcagctacctcgccaaaatcggaacaaccttcggcgacggcgaccaccgcatcgtattgagccatatgaaagaccagcaccggggcatccgtaccgtccgtgaagaatttaccgtcggcgacaaaagttcacggataaatattgaccgccaagcccctgcttaccgcgaaactacccaatccaacaccaacttggcgtacacgggtaaaaacctgggctttgtcgaaaaactggatgccaacgcctatgtgttggaaaaagaacgctattccgccgatgacagccgcaccggctacgcaggcaatgtaaaaggccccaaccatacccaaatcaccactcggggtatgaacttcaacttcgacagccgccttgccgaacaaaccctgctgaaatacggtatcaactaccgccatcaggaaatcaaaccgcaagcgtttttgaacggcgaatttaagatttccgataagaaaaaaacgacgacggaacagaagtcgaaaaatcgtaaaaatgaaaacattgccaaagcctaccgtctgtccaacccgaccaaaaccgataccggcgcgtatatcgaagccattcacgagattgacggctttaccctgaccggcgggctgcgttacgaccgcttcaaagtgaaaacccacgacggcaaaaccgtttcaagcagcaaccttaacccgagtttcggtgtgatttggcagccgcacgaacactggagcttcagcgcgagccacaactacgccagccgcagcccgcgcctgtatgacgcgctgcaaacccacggcaaacgcggcatcatctcgattgccgacggcaccaaagccgaacgcgcgcgcaataccgaaatcggtttcaactacaacgacggcacgtttgccgccaacggcagctacttctggcagaccatcaaagacgcgcttgccaatccgcaaaaccgccacgactctgtcgccgtccgtgaagccgtcaacgccggctacatcaaaaaccacggttacgaattgggcgcgtcctaccgcaccggcggcctgactgccaaagtcggcgtaagccacagcaaaccgcgcttttacgatacgcacaaagacaagctgttgagcgcgaaccccgagtttggcgcacaagtcggccgcacttggacggcctcccttgcctaccgcttccaaaatccgaatctggaaatcggctggcgcggacgctatgttcaaaaagccgtgggttcgatattggtggcaggtcaaaaaggtcgcgacggcaaatttgaaaacgttgtacgccaaggtttcggtgtgaacgatgtcttcgccaactggaaaccgctgggcaaagacacgctcaatgttaatctttcggttaacaacgtgttcaataagttctactatccgcacagccaacgctggaacaataccctgccgggcgtgggacgtgatgtacgcttgggcgtgaactacaagttctaa

SEQ ID NO: 68292 - DNA, 2112 bp, Neisseria meningitidis
atgacactgaaagcaagcaagcaagcaagcaagcaagcaagcaagcaagcaagcaagcaagcaagcggtcgggttaatctattaacattatctgttttatcgctgttttgcacgccatatgtttgaggttcggatgcgtacgatcccgtcaaagaagccgagattaaaaacaaatttattttagaagcggcggaagacagaaattcccacgtttggcgcggcccgtgcagcatatcttttgattgcttcggtatgttcagagctcagcttggttcaaatactcgttctaccaaaatcggcgacgatgccgatttttcattttcagacaagccgaaacccggcacttcccattatttttccagcggtaaaaccgatcaaaattcatccgaatatgggtatgacgaaatcaatatccaaggtaaaaactacaatagcggcatactcgccgtcgataatatgcccgttgttaagaaatatattacagatacttacggggataatttaaaggatgcggttaagaagcaattacaggatttatacaaaacaagacccgaagtttgggaagaaaataaaaaacggactgaggaggcgtatatagaacagcttggaccaaaatttagtatactcaaacagaaaaaccccgatttaattaataaattggtagaagattccgtactcactcctcatagtaatacatcacagactagtctcaacaacatcttcaataaaaaattacacgtcaaaatcgaaaacaaatcccacgtcgccggacaggtgttggaactgaccaagatgacgctgaaagattccctttgggaaccgcgccgccattccgacatccatacgctggaaacttccgataatgcccgcatccgcctgaacacgaaagatgaaaaactgaccgtccataaagcgtatcagggcggcgcggatttcctgttcggctacgacgtgcgggagtcggacgaacccgccctgacctttgaacaaaacgtcagcggaaaatccaatgtggttttggaacgccggccggaaaatctgaaaacgctcgacgggcgcaaactgattgcggcggaaaaggcagaccctaattcgtttgcgtttaaacaaaattaccggcagggactgtacgaattattgctcaagcaatgcgaaggcggattttgcttgggcgtgcagcgtttggctatccccgaggcggaagcggttttatatgcccaacaggcttatgcggcaaatactttgtttgggctgcgtgccgccgacaggggcgacgacgtgtatgccgccgatccgtcccgtcaaaaattgtggctgcgcttcatcggcggtcggtcgcatcaaaatatacggggcggcgcggctgcggacgggcggcgcaaaggcgtgcaaatcggcggcgaggtgtttgtacggcaaaatgaaggcagccgactggcaatcggcgtgatgggcggcagggccggccagcacgcatcagtcaacggcaaaggcggtgcggcaggcagttatttgcatggttatggcgggggtgtttatgctgcgtggcatcagttgcgcgataaacaaacgggtgcgtatttggacggctggttgcaataccaacgtttcaaacatcgcatcaatgatgaaaaccgtgcggaacgctacaaaaccaaaggttggacggcttctgtcgaaggcggctacaacgcgcttgtggcggaaggcgttgtcggaaaaggcaataatgtgcggttttacctgcaaccgcaggctcagtttacctacttgggcgtaaacggcggctttaccgacagcgaggggacggcggtcggactgctcggcagcggtcagtggcaaagccgcgctggcattcgggcaaaaacccgttttgctttgcgtaacggtgtcaatcttcagccttttgccgcttttaatgttttgcacaggtcaaaatctttcggcgtggaaatggacggcgaaaaacagacgctggcaggcaggacggcactcgaagggcggttcggcattgaagccggttggaaaggccatatgtccgcacgcattggatacggcaaaaggacggacggcgacaaagaagccgcattgtcgctcaaatggctgttttga

SEQ ID NO: 68293 - DNA, 831 bp, Neisseria meningitidis
atggggcgtgtgtcgtatttgtgcgtcgatgcggcggagcaggctttgacggatgccggtttgctcggagacgaaagtattactgacggacgcatgggcgttgcctgcggctcttccagcggcagcaccaaagacatcggcgatgtaggcgaattgttgctgaccggcatgtcgcgcaacttcagtgccaacacctatgtgcgtatgatgccgcacagccgcaacggcgaaccggaaaaaaccccgcgcccatacgacgcgaaccgcgacgggctggtcatcggcgaaggcgcggggattttcgtgctggaagaattggaacacgccaaacggcgcggtgcgataatttacgccgaactcgtcggctacggagccaacagcgatgcctaccatatttccacgccccgccccgacgcgcaaggcgcaatccttgcctttcagacggcattgcaacacgcaggtcttgcgcccgaagacatcggctggattaatctgcacggcaccgggacgcaccacaacgacagtatggaaagccgtgccgttgcagcggttttcggcaacaatacgccctgcacgtccaccaagccgcaaaccggacacacgctgggtgcggcgggcgcaatcgaagccgcgttcgcgtggggcattgccgaccggcaaagcaatcccgaaggaaaacttccgccccagctttgggacgggcagaacgatccgaaccttcccgccatcaacctgaccggcagcggcagccgctgggaaaccgaaaaacgcattaccgccagctcgtcgtttgccttcggaggaagcaactgcgtcttaatcatcggatga

SEQ ID NO: 68294 - DNA, 2016 bp, Neisseria meningitidis
atgaaactcgaagcaagcaagcacaagcagaagtttaaaaaatcatttattgtaagtctattttttctattctttaatacctctccgcttttggctgttgattacgtttacgacaattctaaattaacaaatgagcaaattgatcgcttaaaaaaacttcgcgataaaacgagtgaatattggaaaaaagaaacttatcttataaccggggataatccaaaagttccatccgtccccgcactataccctagaacataccaattcgaaaacatcaataactcaaaaaagatttctttttatgatcaaaaatataccgaagattacctagttggtttcgcccgaggtttaggggttgcaaaaagaaatggggacacagaagaaccaatacggaaatattttaagaaatgttttaacactgagctagatgattatagtacttgcagagctgaacaatttggatcccatcctcttgtagtaaacagtcatatattctccttaggtccagaaataaaaaatagccatatcaacagcgaaattttatctgtaggtaattatatcgaatggcttcgcccaacacttaataagcttactggttggcaagaacaactatattctggtttagatccattccactatattaaggttacagacaactcacacgttatcggacaaacaattagtttggatcaattcagattagaaaattctctctgggaaccccgttgggattctgatgttggggaattaaaaacaacgaatgcagacatccgttttaatactaaaagtgaaagtttactcgtaaaagaagattatgctggcggagctcgttttcgttttgcttacgatcctaaagaagcgaaaaatactgcattaatttttgagaaaaatgttactggcacttccaacatcatcttcgaaaatccaatagacgatttaaaaagcctcgacgggcatcaaattatcaaagtaaatggcacagcagataaacacgcattccgtctttctggcaaacaccaaaagggaatttatacgctttctttacaacaacgcccagagggcttttttaccaaagtgcaagaacgcgatgatattgcgatttatgcacaacaggctcaagccgccaataccttattcgccttgcgtttgaacgacaaaaacagcgatatttttgaccgcactttaccacgcaaaggcttgtggttgcgtgtgattgacggacattctaagcaatgggtgcaaggcaaaacagcacctgtagaaggctatcgtaaaggtgtgcaactcggtggcgaggtgttcacatggcaaaacgaaagtaatcaactttctattggcttaatgggcggacaagcagaacaacgcagtactttccgcaatccagatacagacaatcttacaacgggaaatgtgaaaggctttggtgcaggcgtttacgccacttggcatcagcttcaggacaaacagacaggtgcgtatgcggatagctgggtacaatatcaacgtttccgccaccgtattaacactgaagatgctacagaacgttttacttcaaaaggtattaccgcctcaattgaagcgggttacaatgctttattagcagaacacttcactgaaaaaggcaaccgtgttcgtttttacctacaaccacaggctcaattgacttatttgggggtaaacggaaaattcagcgatagcgaaaatgcccacgtgaatttacttggctctcgccaattacaaagccgagtgggcgttcaagctaaagctcaattttcactctataaaaatatcgctattgaacctttcgccgctgtgaacgcgctttaccacaacaaacctttcggtgtggaaatggacggagagcgtcgagtgataaacaataagacggcaattgaaagccaattaggtgtagcagtgaaaatcaaatctcacttaaccttgcaagcaacattcaatcgccaaacaagcaaacatcatcaggctaaacaaggcgcgctgaatttacagtggacgttttaa

SEQ ID NO: 68295 - DNA, 360 bp, Neisseria meningitidis; identical to SEQ ID NO: 40630

SEQ ID NO: 68296 - DNA, 207 bp, Neisseria meningitidis; identical to SEQ ID NO: 44064

SEQ ID NO: 68297 - DNA, 312 bp, Neisseria meningitidis
atgttaccagtgatattgggttctcctgaaatagcttttcctcgtattaatgctttatctttttgggttacttttgtatctttgtttatggtgtatcagtctttttttgtaggtagtggtcctggcggtggttggactttgtaccctcctcttagtgttgagggtcagcctgaattatcattggattctatagttttaggattgcatactgttggtttgggttctttacttggtgctattaattttatgattactactcagaatatacgttccactgcggttactttggatcaagttagaatgtttgtttga

SEQ ID NO: 68298 - DNA, 498 bp, Neisseria meningitidis
  misc_feature 475, 476, 477, 478, 479: 'n' is a, c, g or t
atgcaacagcaacatttgttccgattaaatattttatgcctgtctttaatgaccgcgctgcccgtttatgcagaaaatgtgcaagccggacaagcacaggaaaaacagttggataccatacaggtaaaagccaaaaaacagaaaacccgccgcgataatgaagtaaccggtttgggcaaattggtcaaaaccgccgacaccctcagcaaggaacaggtactcgatatccgcgacctgacgcgttacgaccccggcatcgccgtcgttgaacaagggcgcggcgcaagctcgggctactcgatacgcggtatggacaaaaaccgcgtttccttgacggtggacggcttggcgcaaatacagtcctacaccgcgcaggcggcattgggcgggacgaggacggcgggcagcagcggcgcaatcaatgaaatcgagtatgaaaacgtcaaagctgtcgaaatcagcaaaggctcaaacnnnnncacacacttaattaattaa

SEQ ID NO: 68299 - DNA, 129 bp, Neisseria meningitidis
ttggtttctttttattattctgtgtatattttagtaggttttttgctcggtaataaggttggttatgtttttgatggtcgtagtgttgtttgtttgcctttagtttttataatatataattttttttga

SEQ ID NO: 68300 - DNA, 390 bp, Neisseria meningitidis; identical to SEQ ID NO: 40984

SEQ ID NO: 68301 - DNA, 420 bp, Neisseria meningitidis
atgaaaaaaatgttcctttctgctgtattgcttctgtcggctgcgacccgaaccgtgtgggcggatacggtgttttcctgtaaaacggacaacaacaaatatatagaagttcaaaaaatcaaccgcaatctttacgaatattcgttcggcagtgcggcaaaaaaagaaattgccatacgcaacagcaaagctgacctgttggggcgttccgacaggtggcaaggtatgggcagcggtcgttgggcaacgatgaaattccaaaacggcgaatttatgtacaccatatggacaggcttcgattccgtgactcatacggaaagcagcggtgtcgttgtggagcgtaggggcaaggaagtcgcacgggtcggctgtacgccgaaaaccgcgcaggcgaatttcaacgatgacgatttttcctag

SEQ ID NO: 68302 - DNA, 405 bp, Neisseria meningitidis
  misc_feature 6, 7, 8, 9, 10: 'n' is a, c, g or t
gtgtgnnnnngttttggtgcggatataacacaatacaaaaacatactggaaacttttatgtatgaacctcctgatgagtttagaacagaatattatgaatctcccgactcaaatttactcattgccgtcaaaaaaaacaaaattatttcgatattttgttatcaggagctatattttatgggcgttaatttaataggtctaaattttgaagattttaaacaacttttccatcaccctaaatcatacggtgttgatgaatattatttatcaaatgaatcttatccgacatatgtctatgagtttgatgaaataggggtacaagcatgggaagcaaaagggaaagttgttactatcattgccgggggtaaagacaattattcaacagaaccttactacgatgaataa

SEQ ID NO: 68303 - DNA, 612 bp, Neisseria meningitidis
ttgggcggtgtggcgggctttgaaaaaaatacgcgcgaagccgttgaccggtggatacaggaaaaccccaatgccgccgaaaccgtcgaagccgtcttcaacgttgccgccgcagccaaagtcgcgaagctggcaaaggcggaaaaagcagggaaggctgcggttagtggagatttttcgattggttataaaaacttttctactgtcaaaccaaaagtaattgccaaaggaacgattaatggaaagacttttagagatgttaatcaaagtgcaaaaattggatcgcctgattcacctacattaatagcccaacgagttaatgcaaaaatccaagccgacggtaaacctcgtccgaatgcaaccgttgctaattcacatgctgaaattgatgttatccagcaggcctataatgcaggtaaaacgaaagggggatctatgacaatgacagtttcaggaaaagatgtttgtggttattgtaaaggagatattgcagctgctgctcaagcttctggactgaaatcactgaccgttaatgcgacagatgatgtaacaggaaaaaataaaacttactattggacgcctggtatgaaatcaattaaggagagaaaatga

SEQ ID NO: 68304 - DNA, 324 bp, Neisseria meningitidis; identical to SEQ ID NO: 51379

SEQ ID NO: 68305 - DNA, 663 bp, Neisseria meningitidis
  misc_feature 6, 7, 8, 9, 10: 'n' is a, c, g or t
gtgtgnnnnncggacaccttcatgggattgcgtgactttttgaaggatggggaatggcccaaacgtctggctgcctactcccccgaaggcccacctgccgaaatccacgaacaattcatgctggctgcggaaaacacgctgaacatctttgcacaaaaaggctatttgggattggacgaatttattacgtccaatatcccgaaagagcagcaggataagatgcagggctatttctacgaaatgctttacggcgtgatgaacgctgctttggatgaaaccatacgccggtacggcttgcccgaatggcagcaggatgaagcgcggaatcgtttcctgctgcacagtatggatgcgtacacgggtttgaccgaatatcccgcgcctatgctgctgcaacttgatgggttttccgaggtgcgttcgtcgggtttgcagatgacccgttccccgggtgcgcttttggtctatctcggctcggtgctgttggtattgggtacggtattgatgttttatgtgcgcgaaaaacgggcgtgggtattgttttcagacggcaaaatccgttttgccatgtcttcggcccgcagcgaacgggatttgcagaaggaatttccaaaacacgtcgagagtctgcaacggctcggcaaggacttgaatcatgactga

SEQ ID NO: 68306 - DNA, 612 bp, Neisseria meningitidis
  misc_feature 4, 5, 6, 7, 8: 'n' is a, c, g or t
gtgnnnnnacgtcgggactttgcctctggtccatgtgctgccgtagcgtttgcggtagggtttgctgcatattctgagatgttgccacaacgtgctgccgttgcttttgtcttggcgaaggtagcggtaaatggtgctgtggtggagcgtgatctggtggtgtttgcacaggtaggcgcatacttgttcgggactgagtttgcggcggataagggtgtcgatgtgctgaatcagctgcgaatcgagcttatagggttgtcgcttacgctgtttgatagtctggctttgccgctgggctttttcggcgctgtattgctgcccttgggtgcggtgccgtctgatttcgcggctgatggtgcttttgtggcggttcagctgtttggcgatttcggtgacggtgcagtggcgggacaggtattggatgtggtatcgttcgccttgggtcagttgcgtgtagctcatggcaatctttcttgcaggaaaggtcgtatgctaccgcatactggcctttttctgttagggaaagttgcacttcaaatgcgaatccgccgccgtctgaaatccaagtttcagacggcattttgcgtctgccgtgcgtgcaatcaattttaa

SEQ ID NO: 68307 - DNA, 453 bp, Neisseria meningitidis; identical to SEQ ID NO: 43802

SEQ ID NO: 68308 - DNA, 417 bp, Neisseria meningitidis
atgaaaacatcaacaattgtttttggtggattttttattacagataatggagaacgaatccaaatccctattttagaaaatcctaacattaaagaaataaataactttttttctgtatcaaattttgaaaaaaaagccggagtccttgttttcagaattattcctgagcctgaatttggcaatactgaattaactatctattttgaaaaaggatattatttaccaataattcaaacaattttagaagatggagatattgaagtaaaaaatcttaaaacagaaaattatagtggaaatacaatggaaattttgggagaagtctaccctattgagcatatctctaaaaatatttctataattcaagatataatttctaaatttattataaaaaacaaaccaatcacaataatgatttaa

SEQ ID NO: 68309 - DNA, 873 bp, Neisseria meningitidis; identical to SEQ ID NO: 51478

SEQ ID NO: 68310 - DNA, 1497 bp, Neisseria meningitidis
atgaatttgcctattcaaaaattcatgatgctgtttgcagcagcaatatcgttgctgcaaatccccattagtcatgcgaacggtttggatgcccgtttgcgcgatgatatgcaggcaaaacactacgaaccgggtggtaaataccatctgtttggtaatgctcgcggcagtgttaaaaatcgggtttacgccgtccaaacatttgatgcaactgcggtcggccccatactgcctattacacacgaacggacaggatttgaaggtgttatcggctatgaaacccatttttcagggcacggacatgaagtacacagtccgttcgataatcatgattcaagaagcacttctgatttcagcggcggtgtagacggtggttttactgtttaccaacttcatcggacagggtcggaaatccatccggaggatggatatgacggaccgcaaggcagcgattatccgccccccggaggagcaagggatatatacagctactatgtcaaaggaacttctacaaaaacaaagataaacactgttccgcaagccccattttcagaccgttggctaaaagaaaatgccggtgccgcctctggttttctcagccgtgcggatgaagcaggaaaactgatatgggaaaacgaccccaatcaaaattggtggggtaaccgtatggatgatattcgcggcatcatccaaggtgcagccaatccttttctaacgggttttcagggattgggagttggggcaattacagacagtgcggtaaacccggtaacctatgcggcagcacggaaaactttacagggtattcacaatttaggaaatttaagtccggaagcacaacttgcggccgcaaccgcattacaagacagtgcttttgcggtaaaagacagtatcaactctgccagacaatgggctgatgcccatccgaatataactgcaacagcccaaactgccctttccgtagcagaggccgcaggtacggtttggggcggtaaaaaagtagaacttaacccgactaaatgggattgggttaaaaataccgattataaaacacctgctgcccgacctatgcagactttagatggggaaatggccggtgggaataaaccgcctaaatctataacgtctggaggaaaagccaatgctgcaacttatcctcaattagttaatcaattaactgggcaaaacttaaaaaacattgcggctcaagatccaagattgagtctagctcttcataagagtgaaaaaaattttccaataggaactgcaacttatgaagaggcagataggctaggtaaaatttgggttagtgagggtgcaagacaaactagtggaggcggatggttaagtatagatggcactcgacaatatcggccaccaacagaaaaaaattcacaatttgcaactacaggtattcaagcaaattttgaaacttatactattgattcaaatggaaaaaggaataaaattaaaaatggacatttaaatattaggtaa

SEQ ID NO: 68311 - DNA, 252 bp, Neisseria meningitidis
atggataacacgcgtattatggcagcacatgaagcaggggtaaaagtggaagcgaatgttcataattttaatgaccgattatcatcaaaagagagaatcaggtttaagcatgatggtattgagcctcaaacttggggagaagctatccagctacgaattagaaagcaagaaacacaaaaaggagttccagaagggtggagcaaaagatttcctaacggaagtatttatgatgtaaaggtacttaggaaatga

SEQ ID NO: 68312 - DNA, 360 bp, Neisseria meningitidis
  misc_feature 345, 346, 347, 348, 349: 'n' is a, c, g or t
atgagaaaaatccttgttaccggcggtgcgggctttatcggttctgccgttgtccgtcatattatccgaaacacccaagattccgtcgtcaacctcgacaaactgacctacgcgggcaatctcgaatcgctgaccgacattgccgataatccccgctatgctttcgagcaagtggacatttgcgaccgcgccgaactcgaccgcgtattcgcacaacaccggcccgatgccgtgatgcacttggcggcggaaagccatgtcgaccgctctatcggttcggcaggcgagtttatccaaaccaatatcgtcggcacattcaacctacttgaagcagcccgcgcctannnnncacacacttaa

SEQ ID NO: 68313 - DNA, 2106 bp, Neisseria meningitidis
atggctcgtaagaccccgatcagcctgtaccgtaacatcggtatttccgcccatatcgatgcgggtaaaaccacgacgacagaacgtattttgttctataccggtttgacccacaagctgggcgaagtgcatgacggtgcggctactaccgactacatggaacaagagcaagagcgcggtattaccattacctctgctgccgttacttcctactggtccggtatggcgaaacaattccccgagcaccgcttcaacatcatcgacaccccgggacacgttgactttaccgtagaggtagagcgttctatgcgtgtattggacggcgcggtaatggtttactgcgcggtgggcggtgttcaaccccaatctgaaaccgtatggcggcaagccaacaaataccaagtgccgcgcttggcgtttgtcaataaaatggaccgtcagggtgccaacttcttccgcgttgtcgagcaaatgaaaacccgtttgcgcgcaaaccctgtacctatcgtcattccggttggtgcggaagacaacttcagcggtgtggttgatttgttgaaaatgaaatccatcatttggaatgaagccgataaaggtacaacctttacctatggcgatattcctgccgaattggtcgaaactgccgaagaatggcgtcaaaatatgattgaagccgcagccgaagccagcgaagaactgatggacaaatacttaggcggcgacgagctgaccgaagaagaaatcgtaggcgcgttgcgtcaacgtactttggcaggcgaaattcagcctatgctgtgtggttctgcatttaaaaacaaaggtgttcaacgtatgttggacgcagttgtagaattgctgccagctcctaccgatattcctccggttcaaggtgtcaacccgaataccgaggaagccgacagccgtcaagccagcgatgaagagaaattctctgcattggcgttcaaaatgttgaacgacaaatacgtcggtcagctgacctttatacgcgtttactcaggcgtagtaaaatccggcgataccgtattgaactccgtaaaaggcactcgcgaacgtatcggtcgtttggtacaaatgactgccgcagaccgtactgaaatcgaagaagtacgcgccggcgacatcgcagccgctattggtctgaaagacgttactaccggtgaaaccttgtgtgcggaaagcgcgccgattatcttggaacgcatggaattccccgagccggtaatccatattgccgttgagccgaaaaccaaagccgaccaagagaaaatgggtatcgccctgaaccgcttggctaaagaagacccttctttccgtgtccgtacagacgaagaatccggtcaaaccattatttccggtatgggtgagctgcacttggaaattattgttgaccgtatgaaacgcgaattcggtgtggaagcaaatatcggtgcacctcaagtggcttaccgtgaaactatccgcaaagccgttaaagctgaatacaaacacgcgaaacaatccggtggtaaaggtcaatatggtcacgttgtgattgaaatggaacctatggaaccggggggcgaaggttacgagtttatcgatgaaattaaaggtggcgtgattcctcgtgaattcattccgtctgtcgataaaggtatccgcgatacattgcctaacggtatcgttgccggctatcctgtagttgacgtacgtatccgtttggtattcggttcttaccatgatgtcgactcttcccaattggcatttgaattggctgcttctcaagcgtttaaagaaggtatgcgtcaagcatctcccgccctgcttgagccgattatggcagttgaagtggaaaccccggaagaatacatgggcgacgtaatgggcgacttgaaccgccgtcgcggtgttgtattgggtatggatgatgacggtatcggcggtaaaaaagtccgtgccgaagtacctctggcagaaatgttcggttactcgaccgacctgcgttctgcaacccaaggccgcgctacttactctatggagttcaagaaatattctgaagctcctgcccacatagctgctgctgtaactgaagcccgtaaaggctaa

SEQ ID NO: 68314 - DNA, 735 bp, Neisseria meningitidis
atgacgacacgccaaatcatcctcgataccgaaaccaccggtctgtatgccgacggcggcgaccgcttggtcgagtttgccggtttggaaatggtcaaccgccaaatgaccgacaaaaacctgcacctctatgtccaccccgagcgcgatatgcccgaagaggcggcgagagtgcacggtctgacgatagaggttttggaagggaaaaacgcgccgccgtttgcagaggtcggcaggcagattgccgatttcctgcgcggtgcggaactgattatccacaatgccaaattcgacgtgggcttcctcaatatggagttccgccggatggggttgccgaccgttgaggaactcggctgtaccgttaccgataccctggcgatggcgcgcgaaatgttccccgggcagaaagccagcctggatgccttgtgcaaccgtttttccgtcgaccgcagcaagcgcgtcctgcacggcgcattgatcgactgcgaacttttgggcgaagtctatcttgctatgacgcggcggcagttcgacctgatgggggaggccgaggaggaagagccggcagccaaacctgttgcatctgccgaaatgaaactcggtgccaaactgaaagtgattaaggcggatgaagccgaactggcggcgcacgggcaatatttggacggcttgggcgaagcctgtatctggcgcaaggaagccgtgccgtctgaaaacggcgggacggacgcatga

SEQ ID NO: 68315 - DNA, 4170 bp, Neisseria meningitidis
ttgttgaacttatttaagccgttgcaaactgccggcatggaagaagagtttgatgccattaaaatcggtattgcctctcccgaaaccatccgctcatggtcttatggcgaagttaaaaaacctgaaaccatcaactaccgtacgttcaaacctgagcgtgacggtttgttctgtgccaaaatctttggcccggtcaaagactacgaatgcttgtgcggaaaatacaaacgcttgaaatttaaaggcgtaacgtgtgaaaaatgcggcgtggaagtaaccctgtccaaagtgcgccgcgaacgcatgggccatatcgaattggctgcgcccgtcgcacacatttggttcttaaaatccctgccttcccgcttgggtatggtactggacatgactttgcgcgatatcgaacgcgtattgtactttgaagcatttgtggtaaccgatcccggtatgactccgctgcaacgccgccaattgctgactgaagacgattactacaacaagctggacgaatacggcgacgacttcgatgccaaaatgggtgcggaaggtatccgcgaattgctgcgtaccctgaatgtagcgggcgaaatcgaaatcctgcgtcaagagctggaatcgaccggttccgacaccaaaatcaaaaaaatcgccaaacgtttgaaagtattggaagccttccatcgttccggtatgaaattggaatggatgattatggatgtgctgccggtattacctcccgatttgcgtcctttggttccgttggacggcggccgttttgccacttccgatttgaacgatttgtaccgccgcgtcatcaaccgcaacaaccgtctgaaacgtctgttggaactgcatgcgcccgacatcatcgtccgcaacgaaaaacgtatgttgcaagaagcagttgactcgctgttggataacggccgtcgcggtaaagccatgaccggcgccaacaaacgcccgctgaaatcattggcagacatgattaaaggtaaaggcggtcgcttccgtcaaaacctgttgggcaaacgtgtggactactccggccgttccgtgattaccgtaggcccatacctgcgtctgcaccaatgcggtctgccgaaaaaaatggctttggaactgttcaaaccgttcattttccacaaattggaaaaacaaggtctggcttccaccgttaaagcagcgaaaaaattggtagagcaagaagtaccggaagtatgggacatcttggaagaagtcatccgcgaacatccgattatgctgaaccgtgcgccgaccctgcaccgtttgggtattcaagcgtttgaacctatcttgattgaaggtaaagcgattcagttgcacccattggtgtgtgccgcgttcaacgccgactttgacggcgaccaaatggcggtacacgttccattgagcttggaagcacaaatggaagcacgcacgctgatgctggcttcaaacaacgtattgtctcctgccaacggcgaaccgattattgtaccttcccaagatatcgtattgggtctgtactacatgacccgcgaccgtatcaatgccaaaggcgaaggcagcctgtttgccgatgtgaaagaagtgcatcgcgcataccataccaaacaggtcgagctgggtacaaaaatcaccgtacgtctgcgcgaatgggtgaaaaacgaagcaggtgagtttgagcctgtcgttaaccgttacgaaacaaccgtcggccgtgcattgttgagcgaaatcctgccgaaaggcctgccgtttgaatatgtcaacaaggcattgaagaaaaaagaaatttccaagctgattaacgcatcgttccgcctgtgcggcttgcgcgatacggttatctttgccgaccacctgatgtacaccggtttcggttttgcggcaaaaggcggtatttccattgccgttgacgatatggaaattccgaaagaaaaagcggccttgctggctgaagccaatgccgaggttaaagaaatcgaagaccaataccgtcaaggtttggttaccaacggcgaacgctacaacaaggtggtcgatatttggggtcgtgccggcgataaaatcgctaaggcgatgatggacaacctgtccaaacaaaaagttatcgaccgtgccggcaacgaagtcgatcaagagtcattcaactccatctatatgatggcagactccggtgcccgtggttctgcggctcagattaaacagttgtcaggtatgcgcggtttgatggcgaaacctgacggctcgattattgaaacgccgattacctcaaacttccgcgaaggtctgaccgtattgcaatactttattgcgacccacggtgcgcgtaagggtttggcggataccgcattgaaaaccgcgaactccggttacctgacccgtcgtctggtagacgtaactcaagatttggtcgttgttgaagacgattgcggtacttcagacggctttgttatgaaggcagtggtacaaggcggtgatgtgattgaagcattgcgcgatcgtattttgggccgtgttactgcgtctgacgttgtcgatccgtcaagcggcgagaccttggttgaagccggtacgttgttgactgaaaaactggtggatatgattgaccaatccggtgtcgatgaagtcaaagtccgtacgccgattacttgtaaaacccgccacggtttgtgcgcgcactgttatggtcgcgacttggcacgtggtaagctggtcaatgccggtgaggcagttggtgtgattgccgcccaatcaatcggcgaaccgggtacccagctgactatgcgtacgttccacatcggtggtgcggcatcccgtgcggcagcagccagccaagtggaagccaaatccaacggtacggcacgattcagcagccaaatgcgttatgttgccaacaataaaggcgagttggttgtcatcggccgttcttgtgaagtcgtgattcacgacgatatcggccgtgaacgcgaacgccacaaagtaccttacggtgccatcctgctggtacaagacggtatggccattaaagccggtcaaaccttggcaacctgggatccgcatacccgtccgatgattaccgaacacgcaggtatggtgaaattcgaaaacgtggaagagggcgttaccgttgccaaacaaaccgatgatgtaaccggtttgtccactttggtggtgattgacggtaaacgtcgttcctctagtgcttccaaactgctgcgtccgactgtgaaactcttggacgaaaacggcgtggaaatctgtattcccggtacttctactccggtatccatggcattccccgttggtgcggtgattaccgtacgcgaaggtcaggaaatcggtaaaggcgacgtattggcgcgtattccgcaagcctcttccaaaacccgcgacattaccggcggtctgccgcgcgttgccgaattgtttgaagcacgcgtgccgaaagatgccggtatgttggcggaaattaccggtaccgtttccttcggcaaagagaccaaaggcaagcaacgtctgattgttactgacgtggacggtgtagcatacgagaccttgatttccaaagagaaacaaattctggtacacgacggtcaagtggtaaaccgcggtgaaaccatcgtggacggagctgttgatccgcatgatattctgcgtttgcaaggtatcgaagcactggcacgctacattgtccaagaggtgcaagaggtttaccgtctgcaaggtgtgaagatttctgataaacacatcgaagtcatcatccgtcaaatgttgcgccgtgtgaacattgcggatgccggcgaaaccgggttcattaccggagagcaggtcgaacgcggcgatgtgatggctgccaatgaaaaagcgttggaagaaggcaaagaaccggcgcgttacgaaaacgtattgctgggtattaccaaagcttccctgtccaccgacagcttcatttctgccgcatcgttccaagaaaccacgcgcgtcctgaccgaagccgcgattatgggcaaacaagacgagttgcgtggtttgaaagaaaacgtcatcgtcggtcgcttgattcctgccggtaccggtttgacttaccaccgcagccgtcatcaacaatggcaagaggtggaacaggagactgctgaaacccaagtaacggatgaataa

SEQ ID NO: 68316 - DNA, 651 bp, Neisseria meningitidis
  misc_feature 632, 633, 634, 635, 636: 'n' is a, c, g or t
atgaaactaaaaaataagtatcaaaagttcagcaaaatttcagagcaaaagtttagagaaataatccgctgtttcgctcttgatttgaccgcttccgatactgctaaaatgaccggcattagtgtacgcagtatcaatcctattttcctgaaaatcagacacaggattgctgctctgtgcgaacaaagctcaccactgtccggtgtggtcgaattagatgaatcttactttggtgcgcgacgtatcaggggtaagcgcggtcgcggagcgtcaggtaaaaccatcgtatttggcatactgaaacgcaatggcgtggtctatacggaaatcgttcccgacgcttcgaaagcctcactaatcaaggtcatacgtggtcacatatctgctgacagtgaaatcaatactgacggctggaaagcatatgacggtcttgtcgatatgggctatgagaagcattaccgtgtccatcatggttccaatgagtttgctcgaggaaagcaacatatcaatggtattgaatctttttggagttatgctaaggggcgtttggctaaattttatggtatttccaaagagatgttttatctgcatctcaaagaaacggagtttaggtttaaccaccggcatgaagnnnnncacacacttaattaa

SEQ ID NO: 68317 - DNA, 852 bp, Neisseria meningitidis
  misc_feature 6, 7, 8, 9, 10: 'n' is a, c, g or t
gtgtgnnnnncaaatagtgatgtagaagagttagtgagtaaaacattaatggttgcaagaaaattaaaaattaatgaattaactgaatggtgtaataatgaattacaaggttattcatcaaaaaatttaccaaaatatagaatattttatggagagttaaaagcttttaacccttatcgtggcgatgttccatttatgcttcccgatgaattgagagaacgagtaacaagagttgaatatacctcatcaattagcgaaataagaaacttactaaaaacaaaaaataataattttatacgaattctatctagtaaagaaaaacagtttttaatgaatttacaagatactccatttccacttgaacctaaaataattatttatccaattaacttaatgaatattcaatcaaaagtaagacaactaattttagattgggcattacgactggaagaggaaggcattttaggagacggtatccaatttacaaaatcagaacaggagaaagcaatgtcaaaccaattcaatattcagaatatgcaagggtttattggggatatttttggcggtaatgttcagcaaaatattcaagacggtattcatattgaaaaagaaaatttcaataaactggctaactttttagcaaaaaacgggattccatctgccgaattagaagatttacgaaatgcactgatagaagatggtcagcccacagataaaaaattcggctcaaaagtaagtgcatggattggcaatattattacaaaggcttctaccggtgcaattgatgtttcagtaggtactattgcaggaatattaactaatgcgatttcaaaatattatggcttaatgtaa

SEQ ID NO: 68318 - DNA, 372 bp, Neisseria meningitidis; identical to SEQ ID NO: 41929

SEQ ID NO: 68319 - DNA, 150 bp, Neisseria meningitidis
atgagcgcggctttatggcataaaaaactgtcgtggaaaggatttacaccccaaataaatttccgttacaacaagatcaacagcaatatgcccgccttttattcgcgcagcagcaaggaatggtttgtcagtatagaaaaaacgtattga

SEQ ID NO: 68320 - DNA, 1017 bp, Neisseria meningitidis
atgaacattctcgttaccggcggcaccggttttatcggctctcataccgttgtttctttgctaaaaagcggtcatcaaatcgtgattttggataacctatgcaattccagcatcaatatcctgccacgcttgaaaacgattaccggccaagagattccgttttatcaaggtgatatccgcgatcgtgaaattttgcgccgtatttttacggaaaaccgcattgattcggtgattcattttgccggcttgaaagcagtgggcgaaagcgtggccgagccgatgaaatattatgacaataatgtttccggcagcttggtgttggcggaagaaatggcgcaggctggcgtgtttagcattgtattcagctcttcagcgacggtttatggcgatccgggcaaagtgccttataccgaagatatgccaccgggcgacaccaccagcccttacggcgcatcgaaatcgatggtggagcgcattctcactgatattcaaaaagccgatccacgctggagcgtgattttgttgcgttatttcaatccgattggtgcgcatgaaagcggtttgattggcgagcagccaaacggcatcccgaataatctgttgccttatatctgccaagtagcggcaggcaaactgccgcaattagcggtatttggcgatgactaccctacccccgacggcacggggatgcgtgactatattcatgtgatggatttggcagaaggccatgtcgcggctatgcaggcaaaaagtaatgtagcaggcacgcatttgctgaacttaggctccggccgcgcttcttcggtgttggaaatcatccgcgcatttgaagcagcttcgggtttgacgattccgtatgaagtcaaaccgcgccgtgccggtgatttggcgtgcttctatgccgacccttcctatacaaaggcgcaaatcggctggcaaacccagcgtgatttaacccaaatgatggaagactcatggcgctgggtgagtaataatccgaatggctacgacgattaa

SEQ ID NO: 68321 - DNA, 519 bp, Neisseria meningitidis; identical to SEQ ID NO: 37482

SEQ ID NO: 68322 - DNA, 351 bp, Neisseria meningitidis
atgcaaaacggcgggggaaagatttaccagacggcggacaatgtggaagggattatgctgttgaaggtagtacctgagcgtaccgtttcggcagatgcaaaaaccagagacccgatgtgggacaatgcggctttacagaccagcgaaggcgtaaattttattgctcgtttcctaggattttttagcgatggggaataccgctatgtggatgtcctgcaacccaaccattccgatattattcggtattcaggtaaagattttccgctaaatcaaatacttaaccatatacaccccgcccgttatgcggtaacgttcgaaaacaatgtcgattccaagctgcgcaggcactga

SEQ ID NO: 68323 - DNA, 525 bp, Neisseria meningitidis
gtgttggacagggaaggctatcgccccaatgtcggtattatcctgattaacgaacgtaacgaagtcttttggggcaagcgcgtgcgcgaacattcttggcagtttccgcaaggcggcatcaagccgggcgaaagccccgaaaccgcgatgtaccgcgagctttacgaagaagtcggacttctgccgcaacacgtcaaaatcgtcgggcggacgcgcgactggctgcgttacgacgtgccgaacaactgggtacgccgcgaatggcgcggctcttatcgcggacagaagcagatttggtatctcctgcgcctgaccggccgggattgcgatgtcaacctgcgcgccacccgccaccccgaatttgacggctggcgttggcaccaatattgggcgcccgttgacgaagtgattgatttcaaacgcgacgtttatttgggggcattgaaagaactttcttcccgcttcctgcgcggtatggaaagttatgaagactttgccgcccgccaactttccggcaaccggtaa

SEQ ID NO: 68324 - DNA, 666 bp, Neisseria meningitidis
atgtcgtccataataatcaaaggcacacaaccggcgaaagaaaaaatagaaaagcttcttgaagaagttaaacaaatggatttatcaccattggatcaaatggttactaaagaagaaacgcaacgacaatatgaagccagaaaaagaatgattgaagaaaaaattatgcgctttgaactacacattagtacacttgaaactgccaacgcagaatggaaacaatacatccaacaactcccgactgctacaagaaaaagggaagaagaagaaaaatatgcccaaatggtcgacaatgaaaaaggtatactaaatttaataaacgaaggcaaagaagccattataattttaaaaatgtataaaaatgactgtgagttagtactccaacgtctaagccaacaccagacaaaggacgaactaactcacctaaaggcatcaactaaaatggcacttcatcaaacagtgaatttgccacaattgccactgcctatattcagtggtaacccaaacgaatggagaggattctggagtagttttgatgcagcagtgcatcaacaaattattccagacatccaaaaactcaactatttaatggcatgccttaaaggagaggcatcaaaggccattaggggctatgacataaccccagaaaattatcacgcaatatga

SEQ ID NO: 68325 - DNA, 228 bp, Neisseria meningitidis
  misc_feature 205, 206, 207, 208, 209: 'n' is a, c, g or t
atggaagataagcaagggatgacaaaggcggttgccggcgtgatgacggacgcgccgacggacggcaggaagccggcaaccgcttcaaaccttcccccttatctaacggggggtacagaaaccgaaacggcaggcagggttcaggaagtcttcgaatgttacgaaacgtacataacggacggtaaaggaaacctgttaggcgttnnnnncacacacttaattaattaa

SEQ ID NO: 68326 - DNA, 147 bp, Neisseria meningitidis
atgatgaaagagagggaatttgaaataaaaaaccatctatacaaggggagaagtatagatggcaaaacacattacggggaaaacgtcttactcataagcctgcttgaacaggcgttactcagacaaatggattatatcgtaaattga

SEQ ID NO: 68327 - DNA, 528 bp, Neisseria meningitidis
  misc_feature 6, 7, 8, 9, 10: 'n' is a, c, g or t
gtgtgnnnnntcttggcgaaggtagcggtaaatggtgctgtggtggagcgtgatctggtggtgtttgcacaggtaggcgcatacttgttcgggactgagtttgcggcggataagggtgtcgatgtgctgaatcagctgcgaatcgagcttatagggttgtcgcttacgctgtttgatagtctggctttgccgctgggctttttcggcgctgtattgctgcccttgggtgcggtgccgtctgatttcgcggctgatggtgcttttgtggcggttaagctgtttggcgatttcggtgacggtgcagtggcgggacaggtattggatgtggtatcgttcgccttgggtcagttgcgtgtagctcatggcaatctttcttgcaggaaaggtcgtatgctaccgcatactggcctttttctgttagggaaagttgcacttcaaatgcgaagccgccgaccttttgattgttggttttttcaacccatcttacgtttgatacctaagaactttgtatccattcttcttttctaa

SEQ ID NO: 68328 - DNA, 312 bp, Neisseria meningitidis
  misc_feature 297, 298, 299, 300, 301: 'n' is a, c, g or t
gtgtgttcacaacattgggcaggcggattgtgtattttggggacaattttttcagacggcattcaaggttttttcctgattgccgccgcgcctaaaaaccgcctttcgcgcttaatcaaaaataccgacaacggaatattgcccaaagcgacaatcagatacaacaaggaaatgctgtcaaacaaaacagcaacaccgcgctcaaaacggcggcggaaccataaaataccgttaacgatattgttggcggcaacggcgcgggcgcggaaagtctcgctactggcggtttgcagccannnnncacacacttaa

SEQ ID NO: 68329 - DNA, 531 bp, Neisseria meningitidis
  misc_feature 516, 517, 518, 519, 520: 'n' is a, c, g or t
ttgcattcgatcaagaaaaatgatcgcgaatggaaaacaacagttgaagcaatcgaaagaatacttcgacaactagaagcaatgggcgaaaatctagaacaatccagcatcgaaataataattgaaaataaattaccaatctggattctagatcaaatctatcaacaaaaaaaagaacaagggccatggtcagtaactaaattaagatcatttctcggaaagttggttcagagaaatgaggaagtggcaagaagccaatccctcaatatcgagaaggatccaaaaccaatcaaaaataagccaagaccatacttgcagcatgctagaaatgaaacctcagcattagccataactataccaccaagagaaaaggcgaaagagaattctagctcaaagaagaatgagaaaacgagaagaccttgttccttttgcaagcaggatcattgggacaatgaatgccacgtctatcctacactcaagcaacgaatggaacgcttgagagagaacaatgcttgnnnnncacacacttaa

SEQ ID NO: 68330 - DNA, 1038 bp, Neisseria meningitidis
atggcggaaagtggcaaggaagacctcgccgccgccttcaaaaccgagcttttcaacgacacgatttatgtcctgaccccgcacggcaaagtcctctccctgcccacgggcgcgacccccatcgacttcgcctacgccctgcacagcagcatcggcgaccgttgccgcggtgcgaaagtcgaagggcagattgtgccgctgtccaccccgctcgaaaacggacagcgcgtcgaaatcattaccgccaaagaagggcatccttccgtcaactggctctacgaaggctgggtcaaatccaacaaggcaatcggcaaaatccgcgcctacatccgccagcaaaacgccgacaccgtgcgcgaagaaggccgcgtccaactcgacaaacagcttgccaaactcacgcccaaacccaacctgcaagagcttgccgaaaatctcggctacaaaaagccagaagacctctacaccgccgtcggacaaggcgaaatttccaaccgcgccatccaaaaagcctgcggcacgctgaacgaaccgccgcccgtacccgtcagcgaaaccaccatcgtcaaacagtccaaaatcaaaaaaggcggcaaaaacggcgtgctcatcgacggcgaagacggtctgatgaccacgcttgccaaatgctgcaaacccgcgccgcccgacgacattgtcggcttcgttacccgcgatcgcggcatttcggtacaccgcaaaacctgcccctctttccgacacctcgccgaacaagcacctgaaaaagtgctggacgcaagctgggcggcgttgcaggaaggacaagtgttcgccgtcgatatcgaaatccgcgcccaagaccgctccgggcttttgcgcgacgtatccgacgcactcgcccgccacaaactcaacgttaccgccgtgcaaacccagtcccgcgacttggaagccagcatgaggttcacgctcgaagtcaaacaagtcaacgacctcccgcgcgtcctcgccagcctcggcgacgtcaaaggcgtattgagcgttacccggctttaa

SEQ ID NO: 68331 - DNA, 741 bp, Neisseria meningitidis
  misc_feature 4, 5, 6, 7, 8: 'n' is a, c, g or t
gtgnnnnncgatgaaaaagacacccaagcaggtacggcggcgaatggcaatcaagccgcttcaaatacggcaggtgatgccaatggcaaaacaaaaacctatgcagtcgaagtctgctgttccaacctcaattatctgaaatacgggttgctgacacgcaaaaccgccggcaacacgggggaaggcggcaacggcagcccaaccgccgccgcccaaacggcacagggcgcacaaagtatgttcctccaaggcgagcgcaccgatgaaaaagagattccaagcgagcaaaacgtcgtttatcgggggtcttggtacgggcatattgccaacagcacaagctggagcggcaatgcttccaatgcaacgagtggcaacaaggcggactttaccgtgaattttggcgagaaaaaaattaacggaacgttaaccgctgaaaacaggcaggcggcaacctttaccattgagggaacgattcagggcaacggtttttccggtacggcgaaaactgctgactcaggctttgatctcgatcaaagcaataccatcggcacgcctaaggcatatatcacagatgccaaggtgcagggcggtttttacgggcctaaagccgaagaaatgggtggatggtttgcttatccgggcgacagtcagacgcagccgtccgcttcggggtcaggcgcatcagccgccaacagcgcgaccgtggtattcggtgcgaaacgccaacagcttgtgcaataa

SEQ ID NO: 68332 - DNA, 372 bp, Neisseria meningitidis
atgccaactatcaaccaattggtacgcaaaggccgtcaaaagcccgtgtacgtaaacaaagtgcccgcactggaagcctgcccgcaaaaacgcggcgtgtgcacccgtgtatacacgactacccctaaaaaacctaactctgcattgcgtaaagtatgtaaagtccgcctgaccaacggttttgaagtcatttcatacatcggcggcgaaggccacaacctgcaagagcacagtgtcgtattgattcgcggcggtcgtgtaaaagacttgccaggtgtgcgttaccacactgtacgcggttctttggatactgcaggtgttaaagaccgtaaacaagcccgttccaaatacggtgctaagcgtcctaaataa

SEQ ID NO: 68333 - DNA, 1053 bp, Neisseria meningitidis
atgtcaccctcacatcacagcctagtggacaataataatctaagttacggagtaatcgtatttatgaatactatacaaaactatccagcatatcaaaatgatacagatattgcaaagcaaaaaacttcgtacactgaattaggggttaattttaatccggattattctaaagtacgtcttgtattacaaacaaatagtcgcttaaacattattaaattagcccgaagagatgcccaagcttacgatcaatatattgaaattataaaaaatgattttattttaattagtcatcatcgtgatggctattcagtatttatgaaacgtaaggagtaccatccggagcgactgaaggcttacagcgatttgcgccgccataaagaaatgttatacacactgacaccaccttcaccaaaacgcaaatctgcctctgtccccaaccgtttattggtattgtttgcccacatgaatggcggtggcggctatgatagcagcaatgtcgttgagcgattatttgtccaatatttcgcagatgttcaacgcagcttggtcaaaaacgtctatgtactgcgcattgctgatttgaatatctcccatggctcttactttaccaatactgcaaactatccggattacgaagaccagattcagagcctgattaaagaaaccttatacaaatgcgacatccagcctgaaaacgtcgttttatatggaggcagtaaaggtggcgcgggggcactattacatggtgccattggcaactacaaagtggtagccggcgacccaattattgactcatcggtttataatcaaaaagatgtccatttcgtcaaacattttaaagaagccaacatgactaacatgattgttaatcatctacgcggcaatactcataaaatgtatatttgcgcatctagtgcacagaaattcaattttgaaacaagttctaatctagctcgcgcctcgagcggattaatcaacattgttgacttatcgaatgacatacagattaagacgcaccccaaattactgctcactccgtccctgaacagataa

SEQ ID NO: 68334 - DNA, 270 bp, Neisseria meningitidis; identical to SEQ ID NO: 41351

SEQ ID NO: 68335 - DNA, 468 bp, Neisseria meningitidis
ttgaacaaaaaagattttgtcgaatcggcgggggtaaacttcgccagcgaagaggcgcaggtagtgtttgacgacagcaaaacctcagtagccgacattgccaaaatcattgagaaaaccggttacggcgcgaaggaaaaaacggaagatacattgccgcaacccgaagcagaacaccatatcggctggcggctgtggctgctgttcaccatcaacgtcccgttccttatcggcatggcggggatgatgatcggcagacacgattggatgattccgccgttgtggcagttcgcattggcgagggtgggtgcaactttggctggggggtgccattttaaaaaagggcggggggggagcattaaaggggggctggcgaaaatggacgtgctggttaccatcggccacggtctcgattttacctgtattccgtctatatgctgttttttcagcccgccccggggggcttaa

SEQ ID NO: 68336 - DNA, 399 bp, Neisseria meningitidis
atgttggggcttacacggaacaattgttatgatttgggatttgctatattgtgttatgaacgcaatgcagccgacaaaaaagaattcttggattggttatatggaattgtcaggactgtccctgtcgaaagttttccaaggtatctgatagatttaatagattgtttggaatcagatgattgttctataaatatatacgatattattggctttgttccaactaccggtatgacgaaaaaggaaaaagatgccgtatatggcattacctatatacggaatcaagagttttacgatattccgattactagggagaaggcgttaaaagccttaaaaaaacatcctgaaatttatcagaagtttcggcatttctttccgtttgtagaactgcccccgctttaa

SEQ ID NO: 68337 - DNA, 135 bp, Neisseria meningitidis
atggggcggagttacccgtatgattgccgtatggtcggatacttgtatccgacaaaaatatttgacgcgtctatcgtttccgaaatgccgctgttgaaaaacgtcggattcgagaatccgacctacggttgctga

SEQ ID NO: 68338 - DNA, 270 bp, Neisseria meningitidis
ttgacttcatttttgcttgttttatctgttcctgttttggctggttcttttttatttttattattggatcgtaattttaatacttctttttatgatactagtaagggcggaaatcctttattgtatcaacatttattttggttttttgggcatcctgaggtttatgttattattttgcctgtttttggcattattagagaagctgttttgtttttgactgataaggatcgtttgtttggtcaaactagtataacttttgcttctatttga

SEQ ID NO: 68339 - DNA, 669 bp, Neisseria meningitidis
ttggttaaaacggcagacggttacaaagccattgcccatatccgagtcggcgaccgcgtctttgccaaggacgaggcaagcggggcgatgggatacaaacacgttaccgcccgatacggcaatccgtatcaggaaaccgtttacattaaagtttcagacggcatcggcaacagccaaaccctgatttccaataaaatccacccgttttattcagacggaaaatggattaaagcggaagatttgaaagcgggaaacaggctgcattccgaaaacggtgcggagcagaccgttcaaagtgttaccgtcaaaccgaaaccgctgcaagcctacaatctgaccgttgccgactggcatacttactttgtcaagggtgataaggcggaaacggaaggggtgtgggttcataattcttgtcctcccaaaagagctcccgaataccatgcaggaactgtatccgaatctaattttttaaatgtagctgagaaatggctaggagaaaactataagtcatatccaaatggtcgatatgtatcacaagatggaatgcgacaggtacgatatggtcatcatgaaacaaattcatctacacatcatggtcattttgaatcatatgacaaacccaatggacgtgtaatagaaaatagtgtagtaacaattattcaggattaa

SEQ ID NO: 68340 - DNA, 999 bp, Neisseria meningitidis
atgaagattgcgatttacggtacgaaaagttatgaccgcgaacattttacccgcgccaaccggcatttcggcttcgagctggagttttttgattttatgctggatgtgaaaacggcgaaaatggcggaaggtgcggaggcggtctgtatttttgtgaacgacgacggcagccggcccgtgttggaaaaattggcgcaaattggcgtgaaaactgtggcgttgcgttgtgccggcttcaataatgtggatttaaaggcggctgaagagttgggcttgaaagtcgtgcgcgtgcctgcctattcgcccgaatcggttgcggaacatacggtcggtctgatgctgacgttgaaccgccgtatccacaaagcctatcagcgtacccgcgatgcgaatttttcgctggaaggtctgaccggtttcaatatgtacggcaaaacggcgggcgttatcggcacggggaaaatcggtatcgcaacgatgcggattttaaagggtttcggcatgaacctgctggcttacgatccgttttgcaaccccgaagcggaaaaaatcggcggcaggtatgtggagttgaacgagctgtatgcccggtcggacatcatcacgctgcattgcccctccacgccggaaaaccactatatgctgaacgaagcggcgttcgacaaaatgaaagacggcgtgatgattatcaacaccagccggggcgggctgattgacagtgccgccgcgattgaggcgttgaaacgccggaaaatcggcgcattgggcatggatgtgtacgagaacgagcgcgagctgttttttgaagacaaatccaacgatgtgattaccgacgacgtgttccgccgcctgtcgtcttgtcataatgtgctgtttaccggccatcaggcatttttgacggaagaggcgttgggtaatatttcggaagttacgctgtccaatatccgcgaggtcggacagaccggcgattgcggcaatgcggttcgtgccgacggctga

SEQ ID NO: 68341 - DNA, 297 bp, Neisseria meningitidis
  misc_feature 282, 283, 284, 285, 286: 'n' is a, c, g or t
atgctgattgtccgtccgtcgggcagggccgcagaagatgtcgaaacttgcctgaatgccggttggcgcgcggaagtattgagtccggtcgaaatcgaagcagatgctgccggactggaacttttgtccgaacaatatgcccgtgcggatgccgtgttttgggtcagtccgaccgccgttgaaaccgccgtcccgtaccttaacctttcagacggcataaagatgcacatttccgtagggcagggcagccgccgtgcattggaacgctgtttgggcagaacnnnnncacacacttaa

SEQ ID NO: 68342 - DNA, 417 bp, Neisseria meningitidis
  misc_feature 8, 9, 10, 11, 12: 'n' is a, c, g or t
gtgtgtgnnnnntctgtttctcctgccaatgccgatacggatgtgtttattaacatcgacgtattcggaacgatacgcaacagaaccgaaatgcacctatacaatgccgaaacactgaaagcccaaacaaaactggaatatttcgcagtagacagaaccaataaaaaattgctcatcaaaccaaaaaccaatgcgtttgaagctgcctataaagaaaattacgcattgtggatgggaccgtataaagtaagcaaaggaattaaaccgacagaaggattaatggtcgatttctccgatatccaaccatacggcaatcatatgggtaactctgccccatccgtagaggctgataacagtcatgaggggtatggatacagcgatgaagcagtgcgacgacatagacaagggcaaccttga

SEQ ID NO: 68343 - DNA, 483 bp, Neisseria meningitidis
atgacgaacatccgtatcggacagggctacgatgtccaccaactgaccgaaggcagaaagctgatacttggcggagttgaaatcccatttgaaaaagggctgctcggacactccgatgccgatgcgctgctgcacgccgttaccgacgcgctgcttggtgcggcaggtttgggcgatatcggcagccatttccccgacaccgccgcagagttcaaagatgcggacagccgcgtccttttgcgtgcggcgtatcaaagcgttcaggcgcagggttggcaggcggtcaatgtcgatacgaccgtgattgcacagaaacccaaactcgcgccgcatattccgcaaatgcgtgccaacatcgccgccgatttgggcatagacatttcgtgcgtcaacatcaaaggcaaaaccaacgaaaaactcggttatctcgggcgcatggaaggcatagaggcgcaggcggcggtattgctggtaaggatttga

SEQ ID NO: 68344 - DNA, 1536 bp, Neisseria meningitidis
atgaatttgcctattcaaaaattcatgatgctgtttgcagcagcaatatcgttgctgcaaatccccattagtcatgcgaacggtttggatgcccgtttgcgcgatgatatgcaggcaaaacactacgaaccgggtggtaaataccatctgtttggtaatgctcgcggcagtgttaaaaatcgggtttacgccgtccaaacatttgatgcaactgcggtcggccccatactgcctattacacacgaacggacaggatttgaaggtgttatcggctatgaaacccatttttcagggcacggacatgaagtacacagtccgttcgataatcatgattcaagaagcacttctgatttcagcggcggtgtagacggtggttttactgtttaccaacttcatcggacagggtcggaaatccatccggaggatggatatgacggaccgcaaggcagcgattatccgccccccggaggagcaagggatatatacagctactatgtcaaaggaacttctacaaaaacaaagataaacactgttccgcaagccccattttcagaccgttggctaaaagaaaatgccggtgccgcctctggttttctcagccgtgcggatgaagcaggaaaactgatatgggaaaacgaccccaatcaaaattggtggggtaaccgtatggatgatattcgcggcatcatccaaggtgcagccaatccttttctaacgggttttcagggattgggagttggggcaattacagacagtgcggtaaacccggtaacctatgcggcagcacggaaaactttacagggtattcacaatttaggaaatttaagtcccgaagcacaacttgcggctgcaaccgcattacaagacagtgcttttgcggtaaaagacggtatcaattccgccagacaatgggctgatgcccatccgaatataactgcaacagcccaaactgcccttgccgtagcagaggccgcaggtacggtttggcgcggtaaaaaagtaaaccttaacccgaccaagtgggattgggttaaaaataccggctataaaacacctgctgcccgacctatgcagactttagatggggaaatggccggtgggaataagccagcgaagcaagctactcctaatggcaaagctggcgtttctacacaacaatctttgcaaaatagtctcgttccacaaaaaaattatacgcatactacctataatggtggatcagctattacagatggtaaatatattactgaccctctcagtatggtacgacacaaacctgatgcatctagtctagacaagatagatagcaaaagtttatttaaatcagatgttgatgcggaaaaagctacattagatgctgctagatatgcagataaacataatttatgggatagtcaaaataaggcaaaagttccaacgaacgacgtagttggctatacagacggaaaaccgacacatataattaacatttatcgtagaaagccgaataaagatgggtttagacctgtgcatggaacaccaggtaaggaacgttga

SEQ ID NO: 68345 - DNA, 411 bp, Neisseria meningitidis; identical to SEQ ID NO: 50279

SEQ ID NO: 68346 - DNA, 969 bp, Neisseria meningitidis
atggcaatgcacgccgaatacggcggggttgtgccggaattggcaagccgcgaccatatccgccgccttgttccgttgactgaaggctgtttggcgcaggcgggcgcatcgtatggcgacattgacgcggttgcctttacgcaggggcccggtttgggcggtgcgctgctggcgggttcgagctacgccaacgcgctggctttagcgttggacaagcctgttattcccgtccatcatttggaaggacatctgctgtcgccgctgttggcggaggaaaaacccgactttccttttgtcgcgctgctggtttcgggcgggcatacgcagattatggcggtcaggggcataggcgactacgcgcttttgggcgagagcgtcgatgatgcggcgggcgaggcattcgacaaaacggcgaaactgctgggcttgccgtatccgggcggtgcgaaactgtcggaacttgcggaatcgggcaggcccgaagcgtttgtttttccgcgcccgatgattcattccgacgatttgcagatgagtttttcaggtttgaaaaccgctgttttgactgccgttgaaaaagtgcgtgaggcaaacggttcggaaaccattcccgagcaaacccgcaacgatatttgccgtgcgtttcaagatgcggtggtcgatgtgttggcggcgaaagtgaaaaaagccctgttgcagacagggttcagaaccgtagtggtcgccggcggggtcggtgcaaaccgcaaactccgtgaaactttcggcaatatgacggtgcaaatcccgaccccaaaaggcaagccgaaacatccgtccgaaaaagtcagcgtgtttttcccgccgatggcatactgcacggacaacggtgccatgattgcctttgccggtgcgatgcacctgggcaagggcagggaggtcggtgcgttcaatgtccgtccgcgctggccgctgtcggaaatcgtcaaatga

SEQ ID NO: 68347 - DNA, 1296 bp, Neisseria meningitidis
atgttagacatccaattgctccgcagcaacaccgccgccgttgccgaacggcttgcacggcgcggttataactttgataccgcacgttttgacgcactggaagaacgacgcaagtccgttcaggtgaaaaccgaagaactacaagcctcgcgtaacagcatttccaagcaaatcggcgcactgaaaggtcagggcaaacacgaagaggcacaggcggccatggatcaagtcgcccaaatcaaaaccgatttggaacaggcagccgccgatttggaagccgtgcaaaaggaactggacgcatggctgttgagcattccgaacctgccgcatgaggacgtgcctttcggtaaggatgaaaccgaaaacgtcgaagtccgcaaagtcggcaccccgcgcgaatttgactttgaaatcaaagaccatgtcgatttgggcgaacctttgggtttggattttgaaggcggtgcaaaactctccggcgcacgatttaccgtgatgcgcggacaaatcgcccgtctgcaccgcgccttggcacagttcatgctggatacgcacacgctgcaacacggctacaccgagcattacacgccttatatcgttgacgatacgacgctgcaaggtacgggccaactaccaaaatttgcggaagatctgttccacgttacccgtggcggcgacgaaaccaaaaccacccaatacctgattccgacagccgaagttaccctgaccaataccgttgccgacagcattatcccgtccgaacaactgccgctgaagctgaccgcgcattcgccctgtttccgcagcgaggcgggttcgtacggcaaagacacgcgcggtctgattcgccagcaccagttcgacaaagtggaaatggttcaaatcgttcatcccgaaaaatcatacgaaacgctggaagaaatggtcggccatgccgaaaacatcctgaaggctttggaactgccctaccgcgtgattaccctgtgtaccggcgacatgggcttcggcgcaaccaaaacgtatgacttggaagtttgggtaccggcgcaaaacacctaccgcgaaatctcaagctgctccaactgcgaagatttccaagcccgccgcatgaaggcgcgtttcaaagacgaaaacggcaaaaaccgcttggtacatactttgaacggctccggcttggctgtcggcagaacgctggtcgccgtattggaaaaccatcaaaacgccgacggcagcatcaacatccctgccgcactgcaaccgtatatgggcggcgttgccaagttggaagtgaaataa

SEQ ID NO: 68348 - DNA, 213 bp, Neisseria meningitidis
atgaaattaattaattttgaagagagttcagttaaaattagtctcgataaagatgagttgtatattattcaagcaattgtaggagaaatttattcaggcgtatgcgtggattgtagagattttgagataattcatggtgttgaaaaaataaagttctttctttggataaagaacttaaaaaaatatatgatacttgggataaatgttagctag

SEQ ID NO: 68349 - DNA, 735 bp, Neisseria meningitidis
atgaaaaaatttttttctatcctctcgatatttatcttatctttctttaactctgaatacacatacgctcaatctttgtgtattcagcaaagctcacaaaaccatatccatatcgcaaaaatcaacttaaattgtaaaggtatcaatttaatcgccacccaagaagccgacaaaggcatgacagtctctcaatttgcccgtaaataccgtactgatatcgcgattaatggtagttttttccgcaccggatatttcccttttggcctcgccattaccgatcataaaacttgggacaaaacccgcgatgtccaaaaacgggtttttttagcctgtaatcggcaaaatcgctgtatgatcgaagataaaaatatggtttctaaagtagatgattcttggaaactagccgtatccggctggcaatcttttaatccggcaaccaaaaaatttgaatgttccgatgatgatccggttggttgtacgcatattaaatttataacgaaacaacctcgcacgatggttggattagacgaaaagcgtaattatttatactttgtcgtgatagatggcaggctgcctaaatttaaaggtgctactttaaatgaattaggccaattagccgcaagcctcaaattaactaaggccattaatttagatggcggcggcagctctactatggtcaagggatataaccgtatatcgaccttacccgccacacaaaaaaagaacgtgtggtag

SEQ ID NO: 68350 - DNA, 156 bp, Neisseria meningitidis
ttgtttacatttatttgcatagtttttatcaagtcattgcaaataaatgtaaatatcagattgatgcgtaccgttgtttcagacggcctattattgaaaattacttttcggagtgtgtatgaactattcgtttaccgagaaaaaacgtatccgtaa

SEQ ID NO: 68351 - DNA, 144 bp, Neisseria meningitidis
  misc_feature 121, 122, 123, 124, 125: 'n' is a, c, g or t
ttggcgcaaccaggcgattttctgttcgtaggcggaatcgcctttgccgccctctttgtaacgccagtgggcggcgacaccgaattcgttgaattggtgcatatcgaaggtgcggatttgnnnnncacacacttaattaattaa

SEQ ID NO: 68352 - DNA, 474 bp, Neisseria meningitidis
gtggcggtcgaggaaattagcgcggcaattgctaatgctcaaaccctcgtagtcgctgaatatcgcggtatcagtgtttccagtatgactgagcttcgtgcgaatgcacgtaaagaaggcgtttatttgcgcgttctgaaaaatactttggctcgtcgtgcagtgcaaggtacttcatttgcagaattggccgatcaaatggttggtccgttggtttacgctgcttctgaagatgctgttgctgctgctaaagtgttgcaccaattcgcgaaaaaagatgacaaaattgtcgttaaagccggttcttacaatggcgaagtaatgaatgctgctcaggttgctgagttggcttctattccgagccgcgaagagctgttgtccaaactgttgttcgttatgcaagctcctgtatcgggctttgcgcgcggtttggctgctttggcagagaaaaaagccggcgaagaagccgcttaa

SEQ ID NO: 68353 - DNA, 240 bp, Neisseria meningitidis
gtgctgggtacttctgtgtggggtcatcatatgtatactgccgggttggatgtcgatacacgaacttattttagggctgctactatgattattgctatccctagagctgttaaggtatttaattggttgggtacttttttggttctaatcagaatattcagcctctgtggtgttgaacttatagttttattttttatttactgttggtggtttaaggggtattattttgagggctgctag

SEQ ID NO: 68354 - DNA, 540 bp, Neisseria meningitidis; identical to SEQ ID NO: 61313

SEQ ID NO: 68355 - DNA, 345 bp, Neisseria meningitidis; identical to SEQ ID NO: 36231

SEQ ID NO: 68356 - DNA, 471 bp, Neisseria meningitidis; identical to SEQ ID NO: 42963

SEQ ID NO: 68357 - DNA, 285 bp, Neisseria meningitidis; identical to SEQ ID NO: 60069

SEQ ID NO: 68358 - DNA, 696 bp, Neisseria meningitidis; identical to SEQ ID NO: 41477

SEQ ID NO: 68359 - DNA, 516 bp, Neisseria meningitidis
  misc_feature 493, 494, 495, 496, 497: 'n' is a, c, g or t
atgcagattaaaaaaatcatgaaatggcttcccgtcgccctgtcgcttttgggtgcgttgggttatacggggtacggcagcgaggcggtgcggacggcggttgccgtactcgacgtactcggcgcggcaggggacgcgggttccgacgcgcccgcccgccgccgagcatcggcgaaatccggccaccgctacacaggcacggtgtccaaagtctatgacggcgacacccttcacgttatcgacggcgacggcgcgaaacacaaaatccggatggcgtatatcgacgcgccggagatgaaacaggcttacggcacgcgttcgcgcgacaacctgcgcgcggcggcggaaggcaggaaagtcagcgtgcgcgtgttcgacaccgaccgctaccagcgcgaagtggcgcaggtttctgtcggcaaaaccgatttgaacctgatgcaggtgcaggacggggcggcgtggcattataaaagttatgctaaagaacgannnnncacacacttaattaattaa

SEQ ID NO: 68360 - DNA, 120 bp, Neisseria meningitidis
ttggggtttatttgtgtatctgagattttaagtggtcttgttttttatagttgtgttattgtttttttagtgtttgttttttttattcaggtagtatttttatgttatatgtttttatga

SEQ ID NO: 68361 - DNA, 264 bp, Neisseria meningitidis
atgttaatcggcattcccatccggtcaccccgaacatcgccgcctgccgcgcttttaggaacttcagacggcattgcatcgcgaaccggcggtacatcctcggcaaacggcaggagggcgaggctttccccttcagacggcatcgcaatccgattaccgacgttaatcagttcgacaggtacgccgatatcctcggcaaacgtcgccgaagtcagcaggcagcctgcaaaaaagagatttctgggtttcatatttattttttaa

SEQ ID NO: 68362 - DNA, 141 bp, Neisseria meningitidis
  misc_feature 6, 7, 8, 9, 10: 'n' is a, c, g or t
gtgtgnnnnnttgaatttatacaagattttataactgcaagtacggatgtaattaatctgagttacgaaaattttcgtaaaaattttatacacaaatgtcaactgattctaccaattatgcagccaaacatgaaagtttag

SEQ ID NO: 68363 - DNA, 576 bp, Neisseria meningitidis
ttgctatgcactcaaacagatggggataacgcgcaaaaaaagaccaccacttacaaagaacaagacccggccaaagtaacgcattatttgacacagtcggccgaattttccgactaccaacgtgtttatttggatgaaacaggatttgaccgctacctgttccgtccctatacccgcagcctgaaagggcaaatagtgaaagcgcagataagtggaaaaagataccaacgcttatctttggtgtccgcacaagtcggcaaccggctgattgctccgatggtttatcaaaatacgatgaccggagtcttttttgaagcgtggtttcagcaatgcctactgcccgcattgactcaaaaatcggtaattattttagataatgcgcgatttcaccgtatgggtgtcttacgggaaatggcggaaaaattgggacataaggtattgcctcttgcaccttattcacctgagctcaacccgattgagaaagtgtgggcgaatattaagcggtatctgcgaaccgttttgtctgattacgcccgatttgacgatgcactactgtcctattttgattttaattga

SEQ ID NO: 68364 - DNA, 534 bp, Neisseria meningitidis
ttggctgggattatgttgaaacttggtggttgtggtgtttatcgtataagtaagtctttaagtttttttagttttgagtttttgatttttgtttctttggttagtatggttttttgttcttttatttgtatggttcaaagtgattgtaagtctttagctgcttattcttctatttgtcatatggggtttgttttattatctgagttgagtatggtttattatggtaagtctatggcgttggttatgatgttggctcatggttatacttcttttttaatattttattttattggtgagttttatcatatttctaatagtcgtctagtatattatcttcgtggttattttaatgtcagtgttttgttttgtttgatgttttgtttggttatgatgtctaattttggttttcctgtatctatttcttttttttctgagtatttgatgttaaattggtttagttctgtttgttatgttggtatttttttttatttttttattatttggtttctttttattattctgtgtatattttag

SEQ ID NO: 68365 - DNA, 144 bp, Neisseria meningitidis; identical to SEQ ID NO: 38802

SEQ ID NO: 68366 - DNA, 246 bp, Neisseria meningitidis; identical to SEQ ID NO: 42918

SEQ ID NO: 68367 - DNA, 126 bp, Neisseria meningitidis
atgccgttaaaaactgaaaaacgtattttagcggatttcggcacgactgccgtatcccaaaaacggaacatgccgtctgaagaccgttcagacggcatcgtcgcaccgtatcaaagcgttccgtaa

SEQ ID NO: 68368 - DNA, 435 bp, Neisseria meningitidis
gtggcaaagaaaattatcggctatattaaactgcaaattcctgcaggtaaagccaatccatctcctccggttggtcctgctttgggtcagcgcggtttgaatattatggaattttgtaaggcatttaatgctgcaacccaaggtatggagcctggcttaccgattccggttgtgattactgcatttgcagataaatcattcacatttgtgatgaaaaccccgccagcttctatcttgttgaaaaaggctgccggtttgcaaaaaggtagttctaatcctctgaccaacaaagtgggtaaattgacccgtgcccagttggaagaaattgctaaaactaaagatcctgatttgactgctgctgacttggatgcggctgtccgtactatagcaggttctgctcgatcaatgggcttggatgtggagggtgttgtataa

SEQ ID NO: 68369 - DNA, 372 bp, Neisseria meningitidis; identical to SEQ ID NO: 36794

SEQ ID NO: 68370 - DNA, 732 bp, Neisseria meningitidis
  misc_feature 717, 718, 719, 720, 721: 'n' is a, c, g or t
atgagcgaatatctgtttacttccgaatcggtatccgaaggccatccggacaaagttgccgaccaagtatccgacgcgattttggatgccatcttggcgcaagaccccaaagcgcgtgtcgccgcagaaactttggtcaacacaggcttgtgcgtattggcaggcgaaatcaccaccaccgcccaagtggactacatcaaagtcgcacgcgaaaccatcaaacgcatcggctacaactcctccgagctgggctttgatgccaacggctgcgcggtcggcgtgtactacgaccagcaatctccggacatcgcccaaggcgtgaacgaaggcgaaggcattgacttgaaccaaggcgctggcgaccaaggtttgatgttcggctatgcctgcgacgaaaccccgaccctgatgccgtttgccatctattacagccaccgcctgatgcagcgtcaaagcgaattacgcaaagacggcctcctgccttggctgcgtcccgacgcaaaagcccaactgaccgtggtttacgatagcgaatccggcaaagtaaaacgcattgataccgtcgtcctctctacgcaacacgacccggaaatcggttatgaagagttgaaaaacgccgtcattgagcagattatcaagcccgtcctgccgtctgaactgctgaccgacgaaatcaaatacctgatcaacccgaccggccgcttcgtcatcggcggnnnnncacacacttaa

SEQ ID NO: 68371 - DNA, 114 bp, Neisseria meningitidis
  misc_feature 99, 100, 101, 102, 103: 'n' is a, c, g or t
atggtcgaaatttctcaaacgtgcgatattcgagtagatccgaaacttgacacagcaaagaaaaacatgtcccacacgcaactgattattttgggttcnnnnncacacacttaa

SEQ ID NO: 68372 - DNA, 1362 bp, Neisseria meningitidis
gtgcgcgaccagttgaaaccgcccaaacgcacggcggaagaacaggcgtttttgcccgcgcatttggaactgaccgatacgccggtctctgccgctccgaaatgggcggcgcgttttattatggcgtttgcgcttttggctttgttgtggtcctggttcggcaaaatcgatattgtggcggcggcttcgggcaaaacggtgtcgggcgggcgcagcaaaaccatccagccgctggaaacggcggtggttaaggcggtacatgtgcgcgacgggcagcatgtgaaacagggagaaacgctggcggaactggaggctgtgggaacagacagcgatgtggtgcagtcggagcaggctttgcaggctgcccaattgtccaaactgcgttatgaagcggtattggcggcattggaaagccgtaccgtgccgcatatcgatatggcgcaagcacggtctttaggtctctccgatgccgatgtgcaatcggcgcaggtgttggcgcagcaccagtatcaggcatgggcggcgcaggatgcgcaattgcagtcggctttgcgcggccatcaggcggaattgcagtcggccaaggcgcaggagcagaagctggtttcggtgggggcgatcgagcagcagaaaacagcagactaccgccgtttgcgggccgacaattttatttcggaacatgcgtttttggagcagcagagcaaatcggtcagcaattggaacgatttggaaagtacgcgcggtcagatgaggcagattcaggcggccattgcacaggcggagcagaatcgggtgctgaatacgcagaacctgaaacgcgatacgctggatgcgctgcgccaggcaaacgaacagattgaccaataccgcggccaaacggataaggcaaagcagcggcagcagctgatgacaatacagtcgcctgcggacggcacggtgcaggaattggccacctatacggtgggcggtgtggtgcaggctgcccaaaaaatgatggtgattgcgcccgatgacgacaaaatggacgtggaagttttggtattgaacaaagacatcggttttgtggaacagggacaggatgcggtggtgaagattgagagctttccctatacgcgctacggttatctgacgggcaaggtgaaaagtgtcagccatgatgcggtaagccacgaacagttgggcttggtttatacggcggtggtgtcgctggacaaacataccttgaatattgacggcaaagcagtgaatctgacggcgggcatgaatgtcacggcggagattaaaacgggtaaacggcgggtgctggattatctgttaagcccgctgcaaaccaaattggacgaaagctttagggagcgatag

SEQ ID NO: 68373 - DNA, 1029 bp, Neisseria meningitidis
gtgggacaaaccttatttgacgctgccaaatttgcacaataccgccaaagcaggttcgatacgcaggctgcagaacagcgtttcgatgcggcacgcgaagaattgctgttgaaagttgccgaaagttatttcaacgttttactcagccgagacaccgttgccgcccatgcggcggaaaaagaggcttatgcccagcaggtaaggcaggcgcaggctttattcaataaaggtgctgccaccgcgctggatattcacgaagccaaagccggttacgacaatgccctggcccaagaaatcgccgtattggctgagaaacaaacctatgaaaaccagttgaacgactacaccgacctggatagcaaacaaatcgaggccatagataccgccaacctgttggcacgctatctgcccaagctggaacgttacagtctggatgaatggcagcgcattgccttatccaacaatcatgaataccggatgcagcagcttgccctgcaaagcagcggacaggcgcttcgggcagcacagaacagccgctatcccaccgtttctgcccatgtcggctatcagaataacctctacacttcatctgcgcagaataatgactaccactatcggggcaaagggatgagcgtcggcgtacagttgaatttgccgctttataccggcggagaattgtcgggcaaaatccatgaagccgaagcgcaatacggggccgccgaagcacagctgaccgcaaccgagcggcacatcaaactcgccgtacgccaggcttataccgaaagcggtgcggcgcgttaccaaatcatggcgcaagaacgggttttggaaagcagccgtttgaaactgaaatcgaccgaaaccggccaacaatacggcatccgcaaccggctggaagtaatacgggcgcggcaggaagtcgcccaagcagaacagaaactggctcaagcacggtataaattcatgctggcttatttgcgcttggtgaaagagagcgggttagggttggaaacggtatttgcggaataa

SEQ ID NO: 68374 - DNA, 429 bp, Neisseria meningitidis
atgtcaactgattctaccaattatgcagccaaacatgaaagtttaggaaaatcggtacaacgtgaattacaaaaaacacaaagtcagttgagacaagttgtaagaaaaatgcagagtaaatataatataaataataaagcacgagtagcagaaatatctttgttaaggcaaatgcaaagccaattttctcgaaaatatgtaaacaaaaatcttggtaacagcaacactttggctcaacaaggcagctacaccaaaaaagacggcacaaccgcgcaagcaggcgattcgctgttggctgctgacaacctgcacagccgcctcacggacaaaatgctatccattagccatgttcgggaaaacacgatttccccgtttgttttaggctgtctaaaacaaataaccataaatgtatctcattatttaaaataa

SEQ ID NO: 68375 - DNA, 279 bp, Neisseria meningitidis
atgattcctgttttgttttgtttgttgggttatggtcgtcaggttgagaaggttagggcttgttattatttaattttttatactttgttttttggtataccttatttgtttttgtataggcgtgttttttggtttttgagttttgtttattatgattttttatatcttatgagtttgtatttttgcttagcttgtgttttttggttaagtttcctgtatattttgttcatatttgactgcccaaggtccatgtggagtcgccaactagtactaggataa

SEQ ID NO: 68376 - DNA, 672 bp, Neisseria meningitidis
atgacgacacaagacgaactcaagcgcatcgccgccgaaaaagcagtcgaattcgtacccgaaaacgaatacatcggcatcggtaccggctcgaccatcaactttttcatcgaagccttgggcaaaagcggcaaaaaaatcaaaggcgcggtttcaacctccaaaaaatccagcgaactgcttgcccagtacgacattcccgtcgtttccctgaacgaagtatcgggtttggcggtctatatcgacggtgcggacgaagtcaaccacgccctgcaaatgattaagggcggcggcggcgcgcacctcaacgaaaaaatcgtcgccagcgcatcagaaaaattcatctgcattgcggatgaaagcaaatatgtttcacgtttgggcaaattccctctgcccgtggaagtcgtcgaaagcgcgcgttcccttgtttcgcgcaaactgctcgccatgggcggacagcccgaactgcgtatcggctacaccacgttttacggcaaccaaatcgtcgatgtccacggcttgaatatcgacaaaccgctgacgatggaagacgaaatcaacaaaatcaccggcgtactcgaaaacggaatattcgcccgcgatgccgccgatgtgttgattttggggacggaagagggtgcgaaagtcatctatccctgccaagggtaa

SEQ ID NO: 68377 - DNA, 291 bp, Neisseria meningitidis
  misc_feature 276, 277, 278, 279, 280: 'n' is a, c, g or t
atggctgattattatgcgataactgtaaaatttgcggagcagggtacgccactgaaacaagggggtgtatccaagacggggcacgtttgggttgaactgtattcggctagagataaaaaaatctatagttttggatggtctactggggattctaagactgaaggaggatttgataatcttgttaaagatgacaggagtaattatattaatcatccagatacccccatcagctcaattactgtaccgattacaaaagaacagtttgaccgtgctatnnnnncacacacttaa

SEQ ID NO: 68378 - DNA, 129 bp, Neisseria meningitidis
atggcggattttcgatatggggaaacggtacttttgatttcagacggcctaaatgccgattgcttcattcttattctgaaaccactttttcagacgaccctgaaaggccgtctgaaaacttttgtttag

SEQ ID NO: 68379 - DNA, 270 bp, Neisseria meningitidis
  misc_feature 6, 7, 8, 9, 10: 'n' is a, c, g or t
gtgtgnnnnntccaacacaccaaaataaccaaagcattgaaagcggagacttatttttgtcgcccttaccattcttgggagaaagggctgaatgagaacaccaacggactcatccggcaatacttccccaaacaaaccgatttccgtaacatcagtgatcgggagatacgcagggttcaagatgagttgaaccaccgaccaagaaaaacacttggctacgaaacgccaagtgttttattcttgaatctgttccaaccactaatacactag

SEQ ID NO: 68380 - DNA, 537 bp, Neisseria meningitidis; identical to SEQ ID NO: 42803

SEQ ID NO: 68381 - DNA, 153 bp, Neisseria meningitidis
  misc_feature 8, 9, 10, 11, 12: 'n' is a, c, g or t
gtgtgtgnnnnnctcgaagaccgtggcgagctgatggtcatgaagaaggacggcgaaggctttgtgattgcagcgcgtgcgccggacgggatgtggaagactgccgaggcggaaactttggctcaggcgataactttatgggaggaagtgtga

SEQ ID NO: 68382 - DNA, 1047 bp, Neisseria meningitidis
  misc_feature 8, 9, 10, 11, 12: 'n' is a, c, g or t
gtgtgtgnnnnnatcaacgcacccgaagaaaaagcacgcggtattaccattaacacctcgcacgtggaatacgaaaccgaaacccgccactacgcacacgtagactgcccggggcacgccgactacgttaaaaacatgattaccggcgccgcacaaatggacggtgcaatcctggtatgttccgcagccgacggccctatgccgcaaacccgcgaacacatcctgctggcccgccaagtaggcgtaccttacatcatcgtgttcatgaacaaatgcgacatggtcgacgatgccgagctgttggaactggttgaaatggaaatccgcgacctgctgtccagctacgacttccccggcgatgactgcccgattgtacaaggttccgcactgaaagccttggaaggcgatgccgcttacgaagaaaaaatcttcgaactggctgccgcattggacagctacatcccgactcccgagcgtgccgtggacaaaccgttcctgctgcctatcgaagacgtgttctccatttccggccgcggtacagtagtaaccggccgtgtagagcgcggtatcatccacgttggtgacgagatcgaaatcgtcggtctgaaagaaacccaaaaaaccacctgtaccggtgttgaaatgttccgcaaactgctggacgaaggtcaggcgggcgacaacgtaggcgtattgctgcgcggtaccaaacgtgaagacgtggaacgcggtcaggtattggccaaaccgggtactatcactcctcacaccaaattcaaagcagaagtgtacgtactgagcaaagaagagggcggccgccataccccgttcttcgccaactaccgtccccaattctacttccgtaccaccgacgtaaccggcgcggttactttggaagaaggtgtggaaatggtaatgccgggtgagaacgtaaccattaccgtagaactgattgcgcctatcgctatggaagaaggcctgcgctttgcgattcgcgaaggcggccgtaccgtgggtgccggcgtggtttcttctgttatcgcttaa

SEQ ID NO: 68383 - DNA, 279 bp, Neisseria meningitidis; identical to SEQ ID NO: 37183

SEQ ID NO: 68384 - DNA, 1188 bp, Neisseria meningitidis
atgactgaacactataaaacccttccggaacacgagctgctgattcagaagtctttgatcagcaatctgaatctttgggattgggtatttgccgtgctggtttttgcggctacggttttcgtacagacccgttccggtatgcatatggacatttacgaaacggtcatgttgtgggcaagtgccggtattgccgtgtttttgggttggtttttcaaaccgatgcgctggtttgttcctttaagcgtattgcttgcctatgccgccgtcggtttgtatggcggcaacatcaaatcggcagagattttcctgttgcggtatttcctcagcagccagtcggcgatcatgtggcagtgcgcctttgtcttcttcgccctgttcgcctatatttcgggcgcggttttggcaagcgtaaaaaatgtgccgaccaacacgctgttgggtatgggaaccgtgtttgcatgggtgtctgccgtagcaggctttaccggtctgctggtacgttggcacgaaagctatctgctccgtcccgatgcggggcatattccggtttccaacctgtatgaagtgttcatcctgtttttggtgattaccgcgctgatgtatctttattatgaaggtaagttcgccatacagaaattgggcggcttcgtgttcggctttatggcggtcgtggttggatttgtcttgtggtacagcgtgtcccgcgaggcgcataccatccagccgctgattcccgcgctccagtcctggtggatgaaaatccacgttccggcaaactttatcggttacggcgcgttttgcatttccgcgatgctcggtattgccgaactggtttccctgcgtgcggaaggaaaaggcggaaaactgtggctgccgccgtcggcattgatcgacgaggtgatgtataaggcgattgccgtcggctttctgttctttaccattgccaccattttgggtgcgctgtgggcggcagatgcttggggacgctattggagttgggatccgaaagagacgtgggcgttcatcgtctggctcaattacgccgtttggctgcacttgcggctggttgccggttggcgcggcaaagtgctggcgtggtgggcgattatcggtttgttcgtaaccgcatttgcctttatcggcgtgaatatgtttttgagcgggctgcattcttacggaacgctttga

SEQ ID NO: 68385 - DNA, 306 bp, Neisseria meningitidis
ttggacggtgagatggcaggaggaaacaagccagttgttaaatctatcagaccaactacgcgagatgaattacgtcaagcattgcaagaacaaggttttagacgtactggttcagatgaggctcaatatgaaacatggaaaggtcctgatggcgtgaaaatagatattcgtccaaatggagaggttataagaacccaaagagtgccgcgaaccgatggtgtacagggaaaatatccgcaacgacaaaattatgaaggcaatccattgccaaataatcgtcatcattctggatattttatcaaatga

SEQ ID NO: 68386 - DNA, 123 bp, Neisseria meningitidis
gtgtgtaaagctgccaaaattaacaacgatcccaaaattaacaatgatcccaaaatcttgaagtcaccttatttaaagacaattgcaacaaaacggatgggtgtggcaatggatcaaagatga

SEQ ID NO: 68387 - DNA, 375 bp, Neisseria meningitidis
  misc_feature 360, 361, 362, 363, 364: 'n' is a, c, g or t
atggcgcatgtgtattttgaagtgggcgtgatggtgatcggttttgtgtcactgggtaaatttttggaacaccgtaccaaaaaatctagcctcaacagcttgggcttgctgctcaaacttacaccaacccaagtcaacgtgcaacgcaacggcgaatggaaacagcttcccatcgaccaagtgcaaatcggcgaccttatccgcgccaaccacggcgaacgcattgccgcagacggcatcattgaaagcggcagcggttgggcggacgagagccatcttaccggcgaatccaaccctgaagagaaaaaggcaggcggcaaagtgttggcaggtgcactgatgaccgaaggcagcgtggannnnncacacacttaa

SEQ ID NO: 68388 - DNA, 117 bp, Neisseria meningitidis
atggctatttatgacttaaacgaaatcgtaacccgtgctgcattaggtatatataaaggaaaatggcgaaacatggattttgagcaagttctacaaaacattgttcagcaaccgtag

SEQ ID NO: 68389 - DNA, 4179 bp, Neisseria meningitidis
atgaactattcgtttaccgagaaaaaacgtatccgtaagagttttgcaaagcgggaaaatgttttggaagttcctttcttgctagcaacccaaattgattcttatgcgaagtttttgcagctggaaaatgcttttgacaaacgtaccgatgacggtctgcaggcagcatttaattctattttcccgattgtgagccataacggttatgcgcgattggagtttgtgcattacacattgggcgagcctttgttcgatattcccgaatgtcagttgcgcggaatcacttatgcagcccccttgcgcgcgcgtatccgtttggtgattttggataaggaagcatctaaaccgacggtaaaagaagttcgtgaaaacgaagtgtatatgggcgaaattccgttgatgaccccgagcggttcttttgtgattaacggcacagagcgtgtgattgtctcccagttgcaccgttcgcccggcgtattcttcgagcatgacaaaggtaagacgcactcttccggcaagttgttattctccgcccgtatcattccctaccgcggttcatggttggattttgaatttgacccgaaagatttgctgtatttccgtatcgaccgccgccgtaaaatgccggtaacgattttgttgaaggctttgggctacggcaatgagcaaatcttggatattttctacgacaaagaaacgttctatttgtcttcaaacggtgttcaaaccgatttggtcgcaggccgtctgaaaggcgaaactgccaaggtcgatatcttggataaagaaggcaatgtattggttgccaaaggtaagcgcattactgcgaaaaatatccgtgatattaccaatgcaggcctgacccgtttggatgtagaaccggaaagcctgctgggtaaagcattggctgccgatctgattgattcggaaaccggcgaggtattggcttctgccaatgatgaaattacagaagagttgttggccaaatttgatatcaacggcgtaaaagaaattacgaccctttacatcaatgagttggatcagggtgcttatatctccaacaccttgcgtacggatgagactgccggccggcaggcggcgcgtgttgcgatttaccgtatgatgcgtccgggcgaaccgcccaccgaagaggcggtcgagcaattgtttaaccgcttgttcttcagtgaagacagctacgatttgtcccgcgtaggccgtatgaaatttaatacgcgcacatacgaacaaaaactgtccgaagcccaacaaaactcttggtacggccgcctgctgaacgaaacgtttgccggtgctgccgaaaaaggcggttatgtcctgagcgtcgaagatattgtcgcctcgattgcgactttggtcgagttgcgtaacggccatggtgaagttgacgatatcgatcacttgggcaaccgccgagtacgttcggtaggcgagctgactgaaaaccaattccgcagcggtttggcccgtgtggaacgtgctgtaaaagaacgtttgaatcaggcggaatcagaaaacttgatgccgcacgatttgattaatgcaaaacctgtttctgccgctattaaagaattcttcggctccagccaattgagtcagtttatggatcagaccaaccccttgtctgaagtaacccataaacgccgcgtatccgcattgggtccgggcggtttgacccgcgaacgtgccggcttcgaggtacgggacgtgcatccgacccactacggccgcgtatgtccgattgaaacgcctgaaggtccgaacatcggtttgatcaactcattgtccgtttatgcgcgcaccaatgattacggtttcttggaaacgccttaccgccgcgttatcgacggcaaagtaaccgaggaaatcgattacttgtctgccatcgaagaaggccgctatgtgattgcacaggcgaatgccgatttggattcagatggcaatctgattggcgatttggttacctgtcgtgaaaaaggcgaaaccattatggcaacgcccgaccgcgtccaatatatggacgtggcaactggtcaagtggtatccgttgcagcatccctgattccgttcttggaacacgatgacgcgaaccgcgcattgatgggtgcgaatatgcaacgtcaggcagtgccttgcttgcgtcctgaaaaaccgatggtcggtaccggtatcgagcgttccgttgccgttgactctgctactgcaatcgttgcccgccgaggcggcgtggtcgagtatgtcgatgccaaccgtgttgtgattcgtgtccatgacgacgaagcgactgccggcgaagtgggtgtcgatatttacaacttggttaaatttacccgttccaaccagtctaccaatatcaatcagcgtcctgccgtcaaagccggcgatgttttgcaacgcggcgatttggtggccgatggcgcgtccaccgatttgggcgaattggctttgggtcaaaatatgaccatcgccttcatgccgtggaacggttacaactacgaagactcgattctgatttccgaaaaagtggctgcggacgaccgctatacttcgattcacattgaggaattgaatgtcgttgcccgcgataccaagctgggtgcggaagacattacccgcgatattccgaacttgtccgagcgtatgcaaaaccgtttggacgaatccggtatcgtttacatcggtgcggaagtagaagccggcgatgtgttggtaggcaaggtaacgcctaaaggcgaaacccagctgacgccggaagaaaaactgctgcgcgccatcttcggtgaaaaagcatctgacgtaaaagatacttcattgcgtatgcctaccggcatgagcggtaccgttatcgacgttcaagtcttcactcgtgaaggtattcaacgcgacaaacgtgctcaatccattatcgattccgagttgaaacgctaccgtttggatttgaacgaccaattgcgtattttcgacaacgacgcattcgaccgtatcgagcgtatgattgtcggtcagaaagccaacggcggcccgatgaagctggccaaaggcagtgaaatcacgaccgaatatctggcgggtctgccgagcaggcacgattggttcgatatccgtctgaccgatgaagatttggccaagcagttggaactgattaaagtgagcctgcaacaaaaacgcgaagaagcggacgagttatacgaaatcaagaagaaaaaactgacccaaggcgacgaattgcaacccggcgtacaaaaaatggtgaaagtttttatcgccatcaaacgccgtctgcaagccggcgacaaaatggcgggccgccacggtaacaaaggcgtggtatcgcgcattctgccagtggaagacatgccttacatggcggacggccgtccggtagacatcgtactgaacccattgggcgtaccttcccgtatgaacatcggtcagattttggaagttcacttgggttgggcagcaaaaggtatcggcgagcgtatcgaccgtatgctgaaagagcaacgcaaagcaggcgagttgcgcgagttcttgaacaaactctacaacggcagcggcaagaaagaagatttggatgccctgactgatgaagaaatcatcgaactggcctccaacctgcgtaaaggtgcatctttcgcctctcctgtattcgacggtgcgaaagagtctgaaatccgcgaaatgttgaacttggcttatccgagcgacgatcctgaggttgaaaaactgggcttcaacgacagtaaaacccaaatcacgctgtatgacggccgttcaggcgaagcatttgaccgcaaggttacagtaggtgtgatgcactatctgaaactgcaccacttggttgacgaaaaaatgcacgcgcgttctaccggtccgtacagtctggttacccagcagcctttgggcggtaaagcccagttcggcggccaacgtttcggtgagatggaggtttgggcactggaagcatacggcgcagcctacacgctgcaagagatgctgactgtgaagtctgacgacgtgaacggccgtaccaaaatgtacgaaaacatcgtcaaaggcgaacacaaaatcgatgccggtatgcccgagtccttcaacgtattggtcaaagagattcgctcactgggcttggatatcgatttggaacgttactaa

SEQ ID NO: 68390 - DNA, 1461 bp, Neisseria meningitidis
atgattatgagcaaaattagcaaattggtaacccacccaaaccttttctttcgagattatttcttaaaaaaagcaccgttaaattatggcgaaaatattaaacctttaccaatcgaaacctcttctcatagcaaaaaaaatacagcccataaaacacccgtatcatccgaccaaccaattgaagatccatacccagtaacatttccaattgatgtagtttatacttgggtagattcagatgatgaaaaattcaatgaagaacgcctaaagtttcaaaattcaagcacatctgagactctacaaggcaaagcagaaagcaccgatattgcaagattccaatcacacgacgaattaaaatattcgattcgaagcctgatgaagtatgccccatgggtaaatcatatttacattgtaacaaatggtcaaataccaaaatggttagataccaacaatacaaaggtaacgattatccctcactcaactattatcgacagtcaatttctccctacttttaattctcacgtcattgaatcctctctatataaaatcccagtattatcagagcattacatttatttcaatgatgatgtcatgctaactagagatttaagcccatcttatttctttacaagcagcggattagcaaaactgtttattaccaactctcgtctaccaaatggctataagaatgtgaaagacacaccaacccaatgggcctcaaaaaattcccgtgagcttttacatgcagaaacaggattttgggctgaagccatgtttgcacatacttttcatccacaacgtaaaagtgtacatgaatctattgaacacctatggcatgaacaattaaatgtttgtcgtcaaaaccgtttccgtgatatttcagatattaacatggcgacattcctgcaccaccattttgccattttgacaggccaagctcttgctacacgcactaaatgtatttactttaacattcgctctcctcaagcagctcagcattacaaaacattattagctcgaaaaggaagcgaatacagcccacattctatctgcttaaatgatcatacatcgagcaataaaaatattttatctaattacgaagccaaattacaaagctttttagaaacatactatccagatgtatcagaagtagaaattctccttcctactaaatctgaagtagctgaattagttaaacataaagattatttaactgtatatactaaattattacctattatcaataagcagctggtcaataaatataataaaccttattcatatcttttctattatttaggtttatctgcccagtttttatttaaagaaacgcaacaagaacactaccgggaaactgctgaagaaaatttacaaatcttttgtggcctaaacccaaaacatacactagccctcaaatacttagcggatgtcaccctcacatcacagcctagtggacaataa

SEQ ID NO: 68391 - DNA, 318 bp, Neisseria meningitidis; identical to SEQ ID NO: 46236

SEQ ID NO: 68392 - DNA, 117 bp, Neisseria meningitidis
  misc_feature 98, 99, 100, 101, 102: 'n' is a, c, g or t
atgaaattaaaaagcttagatttcccaactggctatttctattttgataatgcagcaataaactctgataaagtagaagttatagcagttggttatannnnncacacacttaattaa

SEQ ID NO: 68393 - DNA, 228 bp, Neisseria meningitidis; identical to SEQ ID NO: 39542

SEQ ID NO: 68394 - DNA, 861 bp, Neisseria meningitidis
atggctaaggaaaaattcgaacgtagcaaaccgcacgtaaacgttggcaccatcggtcacgttgaccatggtaaaaccaccctgactgccgctttgactactattttggctaaaaaattcggcggtgctgcaaaagcttacgaccaaatcgacaacgcacccgaagaaaaagcacgcggtattaccattaacacctcgcacgtggaatacgaaaccgaaacccgccactacgcacacgtagactgcccggggcacgccgactacgttaaaaacatgattaccggcgccgcacaaatggacggtgcaatcctggtatgttccgcagccgacggccctatgccgcaaacccgcgaacacatcctgctggcccgccaagtaggcgtaccttacatcatcgtgttcatgaacaaatgcgacatggtcgacgatgccgagctgttggaactggttgaaatggaaatccgcgacctgctgtccagctacgacttccccggcgatgactgcccgattgtacaaggttccgcactgaaagccttggaaggcgatgccgcttacgaagaaaaaatcttcgaactggctgccgcattggacagctacatcccgactcccgagcgtgccgtggacaaaccgttcctgctgcctatcgaagacgtgttctccatttccggccgcggtacagtagtaaccggccgtgtagagcgcggtatcatccacgttggtgacgagatcgaaatcgtcggtctgaaagaaacccaaaaaaccacctgtaccggcgttgaaatgttccgcaaactgctggacgaaggtcaggcgggcgacaacgtagcgtattgctgcgcggtaccaaacgtgaagacgtag

SEQ ID NO: 68395 - DNA, 690 bp, Neisseria meningitidis
atgaagcgcaaaaatatcgcgctgattcccgccgccggcatcggggcgcgtttcggtgcggacaaacccaagcaatatgtcgaaatcggaagcaaaaccgttttagaacatacgattgggatttttgaacggcatgaggccgtcgatttgaccgtcgttgtcgtctcgcccgaagacacgtttgccgataaggttcagacggcatttccacaggttcgggtgtggaaaaacggcggacagacccgcgccgaaaccgtccgcaacggtgtggcaaaactgttggaaaccggtttggcggcggaaaccgacaatattctggtacacgatgccgcgcgttgctgcctgccgtctgaagctttgacgcggttgatagaacaggcgggcaacgctgccgaaggcgggattttggcaattcccattgccgatacgctcaagtgcgcggacggtgggaacattagtgcaaccgtcgagcggacgagcctttggcaggcgcaaacgccgcagcttttccgcgccgggctgctgcaccgcgcattggctgcggaaaacttggacggcattaccgatgaagcgtccgccgtggaaaaattgggcatccgccctttgctggtgcagggcgacgcgcgcaatttgaaactgacgcagccgcaggacgcatacatcgtcaggctgctgctcgatgccgtctga

SEQ ID NO: 68396 - DNA, 1710 bp, Neisseria meningitidis
  misc_feature 1687, 1688, 1689, 1690, 1691: 'n' is a, c, g or t
atggctaaaaacaaccaatacagcgaatccagcatcaccgtcctcaaaggtttggaaccggtcaaagaacgtcccggtatgtacacccgcaccgacagcccgacccatatctgccaagaagtcatcgacaacgcggcggacgaggcgttgggcggtttcgctacggcaatcgacgtgcaaattcatgaagacggttcgctttccgtacgcgacaacggccgcggtattcccgtcggtctgcaccctgaagaaggcgtacccgtagtcgaactcgtgttcacccgtctgcacgcaggcggcaagttcaacaaaaaagacggcggcagcgcgtatgccttttcaggcggcctgcacggcgtgggcgtatccgtgaccaacgccctttccagccgccttgaggtaacggtcaaacgcgaaggcaaaatccaccgtatcgtgtttgccggcggcgacgtggtcgaaccgttggcacaagtgggcaaatgcgccgtcaaagacagcggcaccgaagtgcgcgtctggccggacggcaaatattttgaaagcccgaattacagcatccccgaactcgaacgcctgctgcgcgccaaagccgtgctgctgccgggcgtgcgcgtttccctgacccgtccggtcaaaggcgaagacgaagcgcacacccaaacctggcattaccccgacggtctgaaaagctatctgaccgacctgattgccgacgcgcaggaagccgtgcctatcttctcttgcgaaaactacatttcagacgaccacaacggcgatttcagcatcggcgaaggcgccgcctttgccctgacttggctggaagaaggctcgtgtgccaacgaaagctacgtcaacctgattcccacccctttgggcggcacgcatgaagcaggcttgaaacaagccgtgttcaacgccgtcaacaatttcatcaatctgcacaacctcttgccgcgcggcgtgaaagtacaaagcgacgacgtgttcggcaaaaccgcctttgtcctctctgcccgtgtcctcgacccgcagttccaaggtcagaccaaagacaagctgaccaaccgcgacgcgctgaaacttgtcgccgctgtagcgggcgaccctttggaattgtggctgaaccaaaacgtggacttcggtaaaaaaattgccgaactcgccatccgtcaggcgcaggcgcggatgcgttcggttaagaaaatcgaaaagaaaaaaggcagcggcgtcgccgtcctgcccggcaagctgaccgactgcgaaagcgaagacatccgcgaaaacgaactcttccttgtcgaaggcgattccgccggcggctcagccaaactcgcccgcgacaaagccacccaggccatcctgcccctgcgcggcaaagtgctcaacagctttgaagtccaccccgaccagctcttcggcaacgccgaaatccacgacatttcagttgccatcggcgtcgatccgcacggcatcaacgaccatcccgatttaagcggcctgcgttacggcaaaatcgccatcctgtccgatgccgacgtggacggctcgcatattcaagttttgctgctgaccctgttctaccgccacttcccgaaactggtcgctgacggacacatctacgtcgcccagccgccgctgttccgcgtcgatgtcaacgcacaaggcaaaagcaaacccgcccgcnnnnncacacacttaattaattaa

SEQ ID NO: 68397 - DNA, 897 bp, Neisseria meningitidis
atgtttcgtttacaattcaggctgtttccccctttgcgaaccgccatgcacatcctgttgaccgccctgctcaaatgcctctccctgctgccgctttcctgtctgcacacgctgggaaaccggctcggacatctggcgttttaccttttaaaggaagaccgcgcgcgcatcgtcgccaatatgcggcaggcgggtttgaaccccgaccccaaaacggtcaaagccgtttttgcggaaacggcaaaaggcggtttggaacttgcccccgcgtttttcagaaaaccggaagacatagaaacaatgttcaaagcggtacacggttgggaacatgtgcagcaggctttggacaaacacgaagggctgctattcatcacgccgcacatcggcagctacgatttgggcggacgctacatcagccagcagcttccgttcccgctgaccgccatgtacaaaccgccgaaaatcaaagcgatagacaaaatcatgcaggcgggcagggttcgcggcaaaggaaaaaccgcgcctaccagcatacaaggggtcaaacaaatcatcaaagccctgcgttcgggcgaagcaaccatcgtcctgcccgaccacgtcccctcccctcaagaaggcggggaaggcgtatgggtggatttcttcggcaaacctgcctataccatgacgctggcggcaaaattggcacacgtcaaaggcgtgaaaaccctgtttttctgctgcgaacgcctgcctggcggacaaggtttcgatttgcacatccgccccgtccaaggggaattgaacggcgacaaagcccatgatgccgccgtgttcaaccgcaatgccgaatattggatacgccgttttccgacgcagtatctgtttatgtacaaccgctacaaaatgccgtaa

SEQ ID NO: 68398 - DNA, 219 bp, Neisseria meningitidis; identical to SEQ ID NO: 54559

SEQ ID NO: 68399 - DNA, 273 bp, Neisseria meningitidis; identical to SEQ ID NO: 52100

SEQ ID NO: 68400 - DNA, 1065 bp, Neisseria meningitidis; identical to SEQ ID NO: 54393

SEQ ID NO: 68401 - DNA, 822 bp, Neisseria meningitidis; identical to SEQ ID NO: 65943

SEQ ID NO: 68402 - DNA, 663 bp, Neisseria meningitidis; identical to SEQ ID NO: 45178

SEQ ID NO: 68403 - DNA, 1218 bp, Neisseria meningitidis; identical to SEQ ID NO: 61788

SEQ ID NO: 68404 - DNA, 786 bp, Neisseria meningitidis; identical to SEQ ID NO: 44566

SEQ ID NO: 68405 - DNA, 1266 bp, Neisseria meningitidis
atgttcagcttcttccgtcgcaagaaaaaacaggaaacgccggctcccgaggaggctcaagttcaggaaactgcagcaaaagcagaatccgaagttactcaaatagttgaaaatattaaagaagaagtcgaatctttaacggaaagcgtcaaagggcaggtcgaatcggctgttgaaaccgtcagcggtgcggttgaacaggtaaaggaaaccgttgccgagatgctgtctgaagcagaggaagcggcggaaaaagcagcggaacaagtcgaagcggcaaaagaagccgttgccgaaaccgtcggcgaggctgtcgggcaagttcaagaagccgttgcgacaactgaagaacacaagctcggttgggcggcgcgtttgaaacaaggtttgaccaaatcgcgcgacaaaatggcgaaatcgctggcgggcgtgttcggcggcggacaaatcgacgaagatttgtacgaagagctggaaaccgtgctgattaccagcgatatgggcatggaagccaccgaatacctgatgaaagacgtgcgcgaccgcgtcagcctcaaagggctgaaagacggcaacgaattgcgcggcgcgctgaaagaagccttgtacgacctgattaagcctctagagaaaccgctggttttgcccgaaaccaaagagccgtttgtcatcatgcttgctggcatcaacggcgcgggcaaaaccacatccatcggcaaactcgccaaatatttccaagcgcagggcaaatctgtgctgcttgccgccggcgatactttccgcgccgccgcgcgtgagcagcttcaagcttggggcgaacgcaacaacgtaaccgtgatttcgcaaaccacgggcgattccgccgccgtgtgcttcgatgccgtccaagccgccaaagcgcgcggcatcgacattgtgctggccgacaccgccggccgcctgcccacgcagcttcacttgatggaagaaatcaaaaaagtgaaacgcgtgctgcaaaaagccatgcccgacgcgccacacgaaatcatcgtcgtgcttgatgccaatatcggtcaaaacgccgtcaaccaagtcaaagcctttgacgacgcattggggctgaccggtttaattgttaccaagctagacggcacggcaaaaggcggcatcctcgccgcgcttgcctccgaccgccccgtccccgtccgctatatcggcgtgggcgaaggcatagacgatttgcgcccgtttgacgcgcgcgcgtttgtggacgcactgctggattga

SEQ ID NO: 68406 - DNA, 2853 bp, Neisseria meningitidis
atgaaactgtccgaactgttcaaccccgacgaatttgccgcgcggcatttgagtttcggcgacgaagcggcgttgcttgccgctgtcggcgagaaaagtatggacgattttgtcggcaacaccgtgccgcaaagcatccgtatgccgtccgaactcgatttgcccgatgccctgaccgaagcggacgcgttggcaaaattgaaaggcattgcgtcgaaaaacgtgatcaacaagtcctatatcggtttaggctattacccgacccgcgtgccgaatgtgactttgcgcaacgtattggaaaatccgggctggtataccgcctacacgccgtatcaggcggaaatcgcgcagggtcgtttggaagcattgttgaacttccaacaagtgtgcatcgatttgaccggttttcccgtggcgggcgcgtctttgctggacgaggcaactgccgcggctgaagcgatggcgatggcgcaccgagtgggcaaagtgaaatccgaacgtttctttgtggatgcgcgcgtgtatccgcaaactttggacgtgatgaaaacccgcgccaaatatttcggctttgaattggtggtcggtgattttgcccaagcggaggaaggcgaatacttcggtgcgctgttccaatacgtcggcaaagacggcgatgtgcaagacttgcaggacgttatcggccgtctgaaagccaaaggcacaatcgttgccgttgcagccgacattatgagcttggttttgctgaagtctccggctgaactaggtgcggatattgctttgggcaacacgcaacgcttcggcgtgcctatgggctttggtggtccgcacgccgcttatttcgcgtttaaagacgagttcaaacgttccgccccgggccgcatcatcggcgtatccaaagacgcatcaggcaaacctgccttgcgcatggcgttgtccacccgcgagcaacacatccgccgcgaaaaagcgacatccaatatttgtaccgcgcaggcattgctggcgaacttggcgggtatgtacgccgtttaccacggccctgaaggtgtgaaacgcatcgccaaccgcattcacgcgctggcttctgcctttgccgatgcgctggtttcagacggcctgaatgtggttcataaggtcttcttcgataccgttaccgtcgatttcggcaacaaagagaaagcagaccaagtgtttgccgctgctttggaatcgggctataacctgcgccgcgttaacgatactcaagttgcggctgcattccacgaaacatcggcatgcgaagatttggttgatttgtaccgcgcgtttaccggcaaggatgcgttcgcatttgccgatgatgtcaaaggccgtctgaacgccgaattgctgcgtcaagatgacattctgcaacatcctgtgttcaaccgttaccacaccgaacacgaaatgttgcgctatctgaaaaaactcgaagaccgcgatttggcgatgaaccgcagcatgatttcgctcggtagctgcaccatgaaactcaacgcgactgcggaaatgctgccgattacttgggcggagttctccgacatccacccttacgctcccgaagcgcaaaccgtcggctaccgcgaattgcttgccgatatggaaaacagcctgaaagccatcaccggctttgacgcaatttccttccagcccaactccggcgcgcagggcgaatacagcggtatgcttgccatccgccgctatcaggaagcgcaaggcgaagcgcagcgcaacatctgcctgattcccaaatccgcccacggcaccaaccccgccaccgccgccatgctcggtttgaaagtcgtcgtcgtcgataccgacgaacacggcaacgtcaacatcgacgatttgaaagccaaagccgagcaacaccgcgacgctttgtccgccatcatgattacctatccgtccacccacggcgtgtacgaagaaggcatccgcgacatctgccgcatcatccatgaaaacggcggacaggtttatatggacggcgccaacctcaacgctcaaatcggcatcatgcagcctgccgaagtcggcgcggacgtgttgcacatgaacctgcacaaaaccttctgtatccctcacggcggcggcggcccgggcatgggtccgattggcttgaaagcccatctggctccgttcgcaccaggccatgtggtaaccgatatgcacaacgccagtgccgatcaaactgccgtggctgccgcagctttcggttctgcgtccatcctgccgattacttggatgtacctgaccatgatgggcaaacaaggcatggagcaggcaacacgctgggcattgctcaacgccaactacgttgccaaacgcttgagcgaagactatccgattctgtatacaggcaaaaacggccgcgtcgcgcacgaatgtatcgtcgacttgcgtccgctcaaagccgaaagcggcattaccgaaaccgacatcgccaaacgcctgatggactacggcttccacgccccgaccgtctccttccccgttgccggcacgctgatgatcgagccgaccgaaagcgagagcaaagccgaactcgaccgcttcatcgccgccctgaaacaaatcaaacaggaagtgttgaaagtcgagcgcggcgaatggccgaaagaggacaacccgttggtgaacgctccgcataccgcatccgacgtaactggcgaatggacgcatccgtattcccgcgaagaagccgtcttcccattgccgttcgtccgcgaacacaaattctggccgagcgtcaaccgtgtggacgacgtgtacggcgaccgcaatctcgtgtgcagctgcccaccgatggaaaattatgaagactga

SEQ ID NO: 68407 - DNA, 1056 bp, Neisseria meningitidis
atgactattttatcggacgttaaagcattaggacaacaaatctggctggacaacctttcccgctcgctcgtgcaaagcggcgaattggcgcaaatgctgaaacaaggcgtgtgcggcgtaacttccaatcccgccatcttccaaaaagccttcgccggcgacgcgctttacgccgatgaaatcgccgccctcaagcagcaaaacctcagccccaaacaacgctacgaaaccatggcggttgccgatgtgcgtgccgcctgcggcgtttgccttgccgaacacgaatccaccggcggcaaaaccggtttcgtcagcctcgaagtttcgcccgaattgtccaaagacgcgcaaggcacggtagaagaagcgcgccgcctctacgccgccatcgggtgcaaaaacgcgatgattaaagtgcctgccaccgacgcaggcatcgatgcgctcgaaatcctcgtttcagacggcatcagcgtaaacctcacgctgctgttctcacgcgcccaaaccctcaaagcctacgccgcctacgcgcgcggcattgccaaacgcttggcagccggacaaagcgttgcccatatccacgtcgtcgccagcttcttcatctcccgtgtggacggcgcgctggacacaacgctgcccgaccacctcaaaggcaaaatcgccatcgcccttgccaaagccgcctatcaagattgggaacaatatttcaccacccccgaatttgccgcactggaagcccaaggcgcaaaccgcgtgcagcttttatgggcatctaccggcgtgaaaaacccagcctatcccgacacgctctacgttgacaacctgatcggcgcgcacaccgtcaacaccgttcccgatgccacgctcaaagcctttatcgaccacggcacagccaaagccacgctgaccgaaggcgtagaagaagcacaagcgcagcttgccgaaaccgccgcgctcggcatagacgtagaaaccctcgccaaccgcttgcaggaagacggtttgaaacaatttgaagaagcgtttgaaaaactgctcgcaccgttggtttaa

SEQ ID NO: 68408 - DNA, 441 bp, Neisseria meningitidis; identical to SEQ ID NO: 38543

SEQ ID NO: 68409 - DNA, 3834 bp, Neisseria meningitidis; identical to SEQ ID NO: 60470

SEQ ID NO: 68410 - DNA, 1356 bp, Neisseria meningitidis; identical to SEQ ID NO: 62577

SEQ ID NO: 68411 - DNA, 1215 bp, Neisseria meningitidis; identical to SEQ ID NO: 55070

SEQ ID NO: 68412 - DNA, 270 bp, Neisseria meningitidis; identical to SEQ ID NO: 48993

SEQ ID NO: 68413 - DNA, 429 bp, Neisseria meningitidis; identical to SEQ ID NO: 56121

SEQ ID NO: 68414 - DNA, 1053 bp, Neisseria meningitidis; identical to SEQ ID NO: 55130

SEQ ID NO: 68415 - DNA, 225 bp, Neisseria meningitidis; identical to SEQ ID NO: 36622

SEQ ID NO: 68416 - DNA, 231 bp, Neisseria meningitidis; identical to SEQ ID NO: 38834

SEQ ID NO: 68417 - DNA, 1773 bp, Neisseria meningitidis; identical to SEQ ID NO: 61431

SEQ ID NO: 68418 - DNA, 144 bp, Neisseria meningitidis; identical to SEQ ID NO: 53494

SEQ ID NO: 68419 - DNA, 666 bp, Neisseria meningitidis; identical to SEQ ID NO: 37717

SEQ ID NO: 68420 - DNA, 1497 bp, Neisseria meningitidis; identical to SEQ ID NO: 61731

SEQ ID NO: 68421 - DNA, 990 bp, Neisseria meningitidis; identical to SEQ ID NO: 55944

SEQ ID NO: 68422 - DNA, 1284 bp, Neisseria meningitidis; identical to SEQ ID NO: 61207

SEQ ID NO: 68423 - DNA, 846 bp, Neisseria meningitidis; identical to SEQ ID NO: 60364

SEQ ID NO: 68424 - DNA, 303 bp, Neisseria meningitidis; identical to SEQ ID NO: 39628

SEQ ID NO: 68425 - DNA, 864 bp, Neisseria meningitidis; identical to SEQ ID NO: 39125

SEQ ID NO: 68426 - DNA, 1362 bp, Neisseria meningitidis; identical to SEQ ID NO: 54822

SEQ ID NO: 68427 - DNA, 210 bp, Neisseria meningitidis
atgaacatcaacgaactgggcgcaaggatagaccgcccgaccatccgcgaactgattgcctacgcaacctgccgcaaccgccccatttcaaactcgacactgctgcgtatggaaaaagacgggcggataccgtgccgtctgaaaaccccactcacatcccccgtatgggacacccgcgaagttttggaagccctggggttacagcaataa

SEQ ID NO: 68428 - DNA, 1005 bp, Neisseria meningitidis; identical to SEQ ID NO: 60791

SEQ ID NO: 68429 - DNA, 336 bp, Neisseria meningitidis; identical to SEQ ID NO: 60467

SEQ ID NO: 68430 - DNA, 2607 bp, Neisseria meningitidis; identical to SEQ ID NO: 55254

SEQ ID NO: 68431 - DNA, 636 bp, Neisseria meningitidis
ttgaacatcaaatattcgggcatcgaaaacaggtttgaaaccgccatcctgaagaaaaacggcgtaagatacggcttcgtctccttcgcccccaaccttgccgccgtcaaactgaacgattatgccaaagttagaaaactgattaccaaaaccaaacagaaagccgacatcgtcattgtaatgttccacggcggcgcggaagggaaacaggcggaacacctgccgttcgataccgaaatcttctatggggaaaacaggggcaacgtcgtcgagtttgcacggcttgccgtcgattccggcgcggatgtcgtattcgggcaggggccgcacgttactcgcgccgtcgaactttaccgcgaccgcttcatctcctacagcggcggcaactttgccacctacggcgcaatcaacacctccggcatcagcggcatcgcgccgattttcaaaattatcaccgacaaacaggggcggttcgtttccggtaacattatccccatcactcaagtcggcgataaaatccccaaaatcgaccccgagaaaaccgttatcgggcggattatttatctgaaccgcagcgatttccccaaggggaacggactggatgtctcgcccgacggcagcatcacgcgccggtaa

SEQ ID NO: 68432 - DNA, 1176 bp, Neisseria meningitidis; identical to SEQ ID NO: 46694

SEQ ID NO: 68433 - DNA, 483 bp, Neisseria meningitidis; identical to SEQ ID NO: 37786

SEQ ID NO: 68434 - DNA, 855 bp, Neisseria meningitidis; identical to SEQ ID NO: 40316

SEQ ID NO: 68435 - DNA, 276 bp, Neisseria meningitidis; identical to SEQ ID NO: 44823

SEQ ID NO: 68436 - DNA, 669 bp, Neisseria meningitidis; identical to SEQ ID NO: 54451

SEQ ID NO: 68437 - DNA, 903 bp, Neisseria meningitidis; identical to SEQ ID NO: 55579

SEQ ID NO: 68438 - DNA, 1677 bp, Neisseria meningitidis; identical to SEQ ID NO: 60681

SEQ ID NO: 68439 - DNA, 1275 bp, Neisseria meningitidis
atgaaaacactgcaagactggctctcgcatttggaaaccgcccacagcggcggcttgatcgatatgggcttggaacgcgtaggcgaagtgaaaaaacggatgaagctcacgccgcaatgccccgtcgtcgttgtcgcgggaacaaacggcaaaggttcggtctgcgcctacctgacacagatttacaaacaggcgggctacaaaaccggcacactgaccagcccgcatttattgcgttacaacgaacgcatcgccatcaacgccgaacccgtttcggacgatacgattattgcctctttcgagcgcatcgaagcggcgcgcagcgaaatatcgctgacttattttgaattcaatacgttggcggccgtcgacatcttcatgcgcgaacaggttgacgtgatgatattggaagtcggcttgggcggacgcttggacgcggtcaacgcgtttgacggcgattgcgcggtggttaccagcgtggatttggaccatcaggcatttttgggcgatacggtcgagcaggtcggctttgaaaaagcaggcgtgttccgtagcggcaaacccgccatctgcggtcaaaaccccgcgcccaaatcgttgctttcacacgccgaagccataggcgcgaaactgctgatggtgcagcgcgatttcgagtttcacgcgctggaaaacatccaatggaactaccacttccgaccgcagcattcagacagccccgctcgcaaccgtaattccctgcccttccccgcattgcgcggcgcataccaactttccaatgccgcctgtgcgctgaccgtgttggaatgtttgaacgacaaattgccggtggacatcggtgcaatcaaacgcggattgctgctggttgaaaatcccggacgcttccaagtcctgcccggccggccgctgaccgttttggacgtcggacacaatccccacgctgcccgcgccctgcgccgcagcctgattaatttggcgtttgcgcaaaaacgcaccgccgtgttcagtatgctgtccgacaaagacatagacggcgtgttggaaattgtcaaagaccagtttgacgaatggtatatcgcacctttggacatgccgcgcggcatgacgctcgagagcctgcaaaacaaactgcacgaacacagcatcgaaaacatacagacattcgccgccgtccgcgaagcataccgggcggcagcctcaaaagcgggcgagaacgacagaatcgtcgttttcggctcatttcataccgttgccgatgtcatgtcggtactttaa

SEQ ID NO: 68440 - DNA, 624 bp, Neisseria meningitidis; identical to SEQ ID NO: 36421

SEQ ID NO: 68441 - DNA, 1380 bp, Neisseria meningitidis; identical to SEQ ID NO: 55466

SEQ ID NO: 68442 - DNA, 171 bp, Neisseria meningitidis; identical to SEQ ID NO: 36504

SEQ ID NO: 68443 - DNA, 384 bp, Neisseria meningitidis; identical to SEQ ID NO: 38550

SEQ ID NO: 68444 - DNA, 456 bp, Neisseria meningitidis; identical to SEQ ID NO: 50446

SEQ ID NO: 68445 - DNA, 210 bp, Neisseria meningitidis
atggaaagcatgtttatattggtgcccatcagcattattttggcgtttgtcatcggctggtttttttggtggtcgggcaaaaacgggcagtttgacgacttggaagggccggcgcaccgcatcctgatggatgatgattcgacaagtaaactgattgaaaaagagagggaaaacgatgtacgctaaaaaaggcggtttgggactggttaa

SEQ ID NO: 68446 - DNA, 1458 bp, Neisseria meningitidis; identical to SEQ ID NO: 60985

SEQ ID NO: 68447 - DNA, 1443 bp, Neisseria meningitidis
atgcatccgacctattccgccgtacaggcgcggctgctcgaagccaaccgcctttcccccgaactgctcgccaaaagcctgtgcatcatcggcgcgcaccacgtcgattacgccgacatctactgccagcgcaccgcttatgaaagctggcatttggaagagggcatcgtcaaatcgggcagcttccaaatcaatcagggcgtgggtgtgcgcgccgtttcgggcgataaaaccgcctttgcctacgccgacagcctgtgcatcgattcgataaaccgttccgcccgcgccgtccgcgcgattggggcggcaggcggcaaggtgtccgccaaaatgccgtctgaaacgcgcggcaagccggtttgttccgcgtccgaccccattgccggcctcgattccgccgccaaagtcgcgctgttgaacaaagtggaagcaatcgccaaagccgccgatccgcgcatcgtgcaagtgatggccggtttgacctgcgaatacgacatggtttacctcgcccgtctggacggtaaacacgctgccgatatccgcccgatggtgcgcatgaacgttaccgttatcgccaaacagggcgaacgccgcgaacagggcagcgcgggcggcggcggacgctacgacttggcttatttcgatgaaaacttggtgcatcggtttgtcgattccgccgtcaaacaagccctgaccaatcttgaatcccgtcctgcgcctgccggcgaaatgaccgtcgttttgggcaacggctggccgggcgtgttgctgcacgaagcggtcggacacggtttggaaggcgatttcaaccgcaagggaaccagcgtcttttccggccgaatcggcgagcgcgtcgccgccaaaggcgttaccgttgtggatcaaggcgatattgccggccggcgcggttcgctcaacatcgacgacgaaggcaacgaaacccgccgcaccgtattgattgaagacggcatcttggtcggttatatgcaggacgaaaccaatgcccgcctgatgggcacgcaatcgaccggcaacggccgccgcgaaagctacgcctccgtccctatgccgcgcatgaccaatacctttatggaaaacggcggctacgaacccgacgaaatcatcgcgtccatcgacaaaggcatttacgccgtcaacttcggcggcggacaggtggacattaccagcggcaaattcgtgttcagcgcgtccgaagcgtggtgggtggagggcggcaggctgcaataccccgtcaaaggcgcgaccattatcggcaacggccccgaagtgctgaaacacgtttccatgataggcaacgatactgcgctcgacagcggtgtcggcgtgtgcggcaaagaagggcagagcgtccccgtcggcgtggggcaaccgactttgcggattgatgccggactgaccgtcggcggcagcgcaatctga

SEQ ID NO: 68448 - DNA, 456 bp, Neisseria meningitidis; identical to SEQ ID NO: 50674

SEQ ID NO: 68449 - DNA, 366 bp, Neisseria meningitidis; identical to SEQ ID NO: 37248

SEQ ID NO: 68450 - DNA, 1002 bp, Neisseria meningitidis; identical to SEQ ID NO: 60373

SEQ ID NO: 68451 - DNA, 759 bp, Neisseria meningitidis; identical to SEQ ID NO: 55256

SEQ ID NO: 68452 - DNA, 1485 bp, Neisseria meningitidis; identical to SEQ ID NO: 55660

SEQ ID NO: 68453 - DNA, 1044 bp, Neisseria meningitidis; identical to SEQ ID NO: 54262

SEQ ID NO: 68454 - DNA, 540 bp, Neisseria meningitidis
atggattttttggagatttttattatgtctgcatttagaaaaatattattaataatatcttgcctattgattgctagctgcagttttgttgaaactattttttatatggctattagcccagaacctgttgtggtagactttcctcttggtaaaaaaacaaaaagatctattgaactcaaacagaaaattggtaaaccttatgcaatatcgttaggaactaattttatacattatgatccaaaacagggggagaggtggattgatgataagttaaactatccatataatatatcggttaaaatatttaaagtggaagaagatggtaaaaaacttattatagatgagttgcttacagagagaagtagaaaattaggaggcggagtatttggagctggggggaaatacagtatgtatatttatgatttttatttgccggaaggggaatatttatttgagatttctgataatagtgaatatattccactttacgatgaaataaataattctataagaatagtagttaatgcacgaattcagtaa

SEQ ID NO: 68455 - DNA, 1176 bp, Neisseria meningitidis
atgcaaaatatttttgaccctttggttattcgtggaaaatcccttacccccatcgtgcaaggcggtatgggggtcggtgtttccgcatcgggtttatccagcgcggtggcacgtgaaaacggtatcggaacgattgccagtgtggatttgcgccaccttcacgaagacctactcgccgaatcccaaatcaatccgagtgaagagaaatatacgtctttgaactgtaccgcattggacagggaaatccaaaaagccaaaagtgcttcagagggaaaagggctgattgcggtcaacgtgatgaaggcggtcaaagaccacgccgcatatgtccgccaggcttgcgaatcaggggcggatgcggttgtaatgggtgccggtctgcctttagacctgccggaaatgaccgagggctatcataaatatgtcgcgctgctgccgattctgtccgaatcgcgcggtattaatatcgtcttgaaacgttggatgaaaaaaggcatattgcccgatgcgattgtagtcgaacatcctgcccacgcggccggacatttgggtgcatcaaccgttgaaggcgtaaacgatgccaagttcgacttcaaacgcgtgattgaggaaacgtttgaagttttcaaaagtttagggctggaaagcgaaaaaatcccgcttattcttgcgggaggcatggcaaattttgaaaaagtcaaaaccgccctaaagaactggggagcatccgccgttcaaatcggtacggcttttgccgttaccgaagaaggagatgcacaccttaacttcaaaaaaacgctcgccggtgcggaaactgaaaaagtagtcgaatttatgtctgttgccggtttgccggcgcgcggtgtccgcaccaaattcctagacagctacatcaagcgtgaaagcaaacttcagacaaacgccaaagccgacccgcgccgctgtacccaaggtttaaactgcctgactagctgcggcctgcgcgacgggctttccaaagcagggcaattctgtattgatatccagcttgctgccgcatttcgtggagaagtagataaaggcctgttcttcagaggtaaagacccgctgcccttcggtaatgccatccgcaccgtccgcgagacgatacaatatctgctgacggggagcgaacctgttgcaacgctcggacgctga

SEQ ID NO: 68456 - DNA, 1125 bp, Neisseria meningitidis; identical to SEQ ID NO: 53157

SEQ ID NO: 68457 - DNA, 969 bp, Neisseria meningitidis
atgagacgtaaaatgctaaacgtaccaaaaggcagttatgatggtatgaagggttttaccattattgaatttttggttgcgggcatgctcagtatgattgtcctgatggcggtcggatcgagttacttcacgtcccggaaattaaatgatgcggcaaacgagcgtcttgctattcaacaggatttgcggaatgcggcaacattaattgtccgcgatgcaagaatggcggggagcttcggttgtttcaatatgtctgagcataccgaaaaggatgttgtttccgatgtgccgcaaaaaaaccgtcttttttccttaaaagggagcagtgcaaataaacttatccccaacggtacagataataaacttatccccataacggaatctttagatatcaattatcagaattttttccaggttggtagcgcattgatttttcaatacggaatcgatgatgttaatgcaagcgccgcgactaccgtcgtcagcagctgtgccgcaatatcgaaaccgggcaagcaaatccttactttagaaaatgtaaaaaaagaattgaagatttcggatcaggataaggagcaaaatggcaatatagcgcgtcaaaggcatgtggtcaatgcctatgcggtcggcaggattgccggtgaggaaggtttgttccgcttccaattggatgataagggcaagtggggtaatcctcagttgctcgcgaaaaagattagatatatgaaagtgcggtatatctatgtttccgactgtcctgaagatgacgatgccggcaaagaggaaacattcagatatacggataaattcaacagcgcccaagatgctgttacgcccgccggggtggaggttttattgagtagcggtactgataccaagattgccgcttcttcagacaatcatatttatgcttaccgtatcgatgcgacaatacgcgggggaaatgtatgcgcaaacagaacactttga

SEQ ID NO: 68458 - DNA, 321 bp, Neisseria meningitidis; identical to SEQ ID NO: 38688

SEQ ID NO: 68459 - DNA, 1185 bp, Neisseria meningitidis; identical to SEQ ID NO: 56072

SEQ ID NO: 68460 - DNA, 843 bp, Neisseria meningitidis; identical to SEQ ID NO: 55758

SEQ ID NO: 68461 - DNA, 900 bp, Neisseria meningitidis; identical to SEQ ID NO: 60293

SEQ ID NO: 68462 - DNA, 1131 bp, Neisseria meningitidis; identical to SEQ ID NO: 61127

SEQ ID NO: 68463 - DNA, 5589 bp, Neisseria meningitidis
atgaataaaggtttacatcgcattatctttagtaaaaagcacagcaccatggttgcagtagccgaaactgccaacagccagggcaaaggtaaacaggcaggcagttcggtttctgtttcactgaaaacttcaggcgacctttgcggcaaactcaaaaccacccttaaaactttggtctgctctttggtttccctgagtatggtattgcctgcccatgcccaaattaccaccgacaaatcagcacctaaaaaccagcaggtcgttatccttaaaaccaacactggtgcccccttggtgaatatccaaactccgaatggacgcggattgagccacaaccgctatacgcagtttgatgttgacaacaaaggggcagtgttaaacaacgaccgtaacaataatccgtttgtggtcaaaggcagtgcgcaattgattttgaacgaggtacgcggtacggctagcaaactcaacggcatcgttaccgtaggcggtcaaaaggccgacgtgattattgccaaccccaacggcattaccgttaatggcggcggctttaaaaatgtcggtcggggcatcttaactaccggtgcgccccaaatcggcaaagacggtgcactgacaggatttgatgtgcgtcaaggcacattgaccgtaggagcagcaggttggaatgataaaggcgaagccgactacaccggggtacttgctcgtgcagttgctttgcaggggaaattacagggtaaaaacctggcggtttctaccggtcctcagaaagtagattacgccagcggcgaaatcagtgcaggtacggcagcgggtacgaaaccgactattgcccttgatactgccgcactgggcggtatgtacgccgacagcatcacactgattgccaatgaaaaaggcgtaggcgtcaaaaatgccggcacactcgaagcggccaagcaattgattgtgacttcgtcaggccgcattgaaaacagcggccgcatcgccaccactgccgacggcaccgaagcttcaccgacttatctctccatcgaaaccaccgaaaaaggagcggcaggcacatttatctccaatgatggtcggatcgagagcaaaggcttattggttattgataccggggaggacatcggtttgcgtaacggagcggtcgttcaaaacaacggcaaccgccctgctgctacggtattaaatgccggccgtaatttggttatcgaaagcaaagcaaatgtgaacaatgctaaaggttcgaccaatctgtcgaccggcggccgtaccgtcatcaaggaggccagtattcagactggcactaccgtatacagttccagcaaaggcaacgccgaattaggcaataacacacgcattaccggggcagatgttaccgtattatccaacggcaccatcagcagttccgccgtaatagatgccaaagacaccgcacacatcgaagcaggcaaaccgctttctttggaagcttcaacagttacctccgatatccgcttaaacggaggcagtatcaagggcggcaagcagcttgctttactggcagacgataacattactgccaaaactaccaatctgaatactcccggcaatctgtatgttcatacaggtaaagatctgaatttgaatgttgataaagatttgtctgccgccagcatccatttgaaatcggataacgctgcccatattaccggcaccagtaaaaccctcactgcctcaaaagacatgggtgtggaggcaggctcgctgaatgttaccaataccaatctgcgtaccaactcgggtaatctgcacattcaggcagccaaaggcaatattcagcttcgcaataccaagctgaacgcagccaaggctctcgaaaccaccgcattgcagggcaatatcgtttcagacggccttcatgctgtttctgcagacggtcatgtatccttattggccaacggtaatgccgactttaccggtcacaataccctgacagccaaggccgatgtcaatgcaggatcggttggtaaaggccgtctgaaagcagacaataccaatatcacttcatcttcaggagatattacgttggttgccggcaacggtattcagcttggtgacggaaaacaacgcaattcaatcaacggaaaacacatcagcatcaaaaacaacggtggtaatgccgacttaaaaaaccttaacgtccatgccaaaagcggggcattgaacattcattccgaccgggcattgagcatagaaaataccaagctggagtctacccataatacgcatcttaatgcacaacacgagcgggtaacgctcaaccaagtagatgcctacgcacaccgtcatctaagcattaccggcagccagatttggcaaaacgacaaactgccttctgccaacaagctggtggctaacggtgtattggcactcaatgcgcgctattcccaaattgccgacaacaccacgctgagagcgggtgcaatcaaccttactgccggtaccgccctagtcaagcgcggcaacatcaattggagtaccgtttcgaccaaaactttggaagataatgccgaattaaaaccattggccggacggctgaatattgaagcaggtagcggcacattaaccatcgaacctgccaaccgcatcagtgcgcataccgacctgagcatcaaaacaggcggaaaattgctgttgtctgtaaaaggaggaaatgcaggtgcgcctagtgctcaagtttcctcattggaagcaaaaggcaatatccgtctggttacaggagaaacagatttaagaggttctaaaattacagccggtaaaaacttggttgtcgccaccaccaaaggcaagttgaatatcgaagccgtaaacaactcattcagcaattattttcctacacaaaaagcggctgaactcaaccaaaaatccaaagaattggaacagcagattgcgcagttgaaaaaaagctcgcctaaaagcaagctgattccaaccctgcaagaagaacgcgaccgtctcgctttctatattcaagccatcaacaaggaagttaaaggtaaaaaacccaaaggcaaagaatatctgcaagccaagctttctgcacaaaatattgacttgatttccgcacaaggcatcgaaatcagcggttccgatattaccgcttccaaaaaactgaaccttcacgccgcaggcgtattgccaaaggcagcagattcagaggcggctgctattctgattgacggcataaccgaccaatatgaaattggcaagcccacctacaagagtcactacgacaaagctgctctgaacaagccttcacgtttgaccggacgtacgggggtaagtattcatgcagctgcggcactcgatgatgcacgtattattatcggtgcatccgaaatcaaagctccctcaggcagcatagacatcaaagcccatagtgatattgtactggaggctggacaaaacgatgcctataccttcttaaaaaccaaaggtaaaagcggcaaaatcatcagaaaaaccaagtttaccagcacccgcgaccacctgattatgccagcccccgtcgagctgaccgccaacggtatcacgcttcaggcaggcggcaacatcgaagctaataccacccgcttcaatgcccctgcaggtaaagttaccctggttgcgggtgaagagctgcaactgctggcagaagaaggcatccacaagcacgagttggatgtccaaaaaagccgccgctttatcggcatcaaggtaggtaagagcaattacagtaaaaacgaactgaacgaaaccaaattgcctgtccgcgtcgtcgcccaaactgcagccacccgttcaggctgggataccgtgctcgaaggtaccgaattcaaaaccacgctggccggtgccgacattcaggcaggtgtaggcgaaaaagcccgtgtcgatgcgaaaattatcctcaaaggcattgtgaaccgtatccagtcggaagaaaaattagaaaccaactcaaccgtatggcagaaacaggccggacgcggcagcactatcgaaacgctaaaactgcccagcttcgaaagccctactccgcccaaattgtccgcacccggcggctatatcgtcgacattccgaaaggcaatctgaaaaccgaaatcgaaaagctgtccaaacagcccgagtatgcctatctgaaacagctccaagtagcgaaaaacatcaactggaatcaggtgcagcttgcttacgacagatgggactacaaacaggagggcttaaccgaagcaggtgcggcgattatcgcactggccgttaccgtggtcacctcaggcgcaggaaccggagccgtattgggattaaacggtgcggccgccgccgcaaccgatgcagcattcgcctctttggccagccaggcttccgtatcgttcatcaacaacaaaggcgatgtcggcaaaaccctgaaagagctgggcagaagcagcacggtgaaaaatctggtggttgccgccgctaccgcaggcgtagccgacaaaatcggcgcttcggcactgaacaatgtcagcgataagcagtggatcaacaacctgaccgtcaacctagccaatgcgggcagtgccgcactgattaataccgctgtcaacggcggcagcctgaaagacaatctggaagcgaatatccttgcggctttggtgaatactgcgcatggagaagcagccagtaaaatcaaacagttggatcagcactacatagtccacaagattgcccatgccatagcgggctgtgcggcagcggcggcgaataagggcaagtgtcaggacggcgcgattggtgcggtcgtgggggagattgtcggggaggctttggttaagaataccgatttcagcggtatgactgcttctgaaattgaaaaagctaaagcgaatattactgcgtatgcaaaattggtagccggagcgactgtaggtgttacaggaggcaatgttgatgtggcggcaaatgcttccgaaacagctgttaaaaataatgcattagatattatttgggatatcggcaacctcgtatgggacggcggtaaatggatttacgccaaatctattggcgataagcagatggctcgagaagcggcgattgattttggtgtggatgccgccgcagctgccgttccctttgttccggcaggtgcgactaaaatcagccgaggcggggcttatgttctgaaggcgggagacgaagcagttgatacggctaaagccatacaggaaattcagaagcagaccggaatcaagcttacttatgataaggttaataaggtttggacaacaccggcggggttagattatgggttagatgctaagcatggtaataggattaaacatgttttagcccatacaattccaaatccaaacaaacctgttcattctgtttttaatgtgtcccgtaaagaagttttgcctttggttgatgaagcttggagaatgaaaggaaatcctttgccaaatgattcatccgtatatcttgtagatatgaagaaacctattggaacaaaaggagaaacaaaagtgcggattgttgtgcaaaaaggaacaaataaaatcatttctgcatatcctcagaaataa

SEQ ID NO: 68464 - DNA, 948 bp, Neisseria meningitidis; identical to SEQ ID NO: 61824

SEQ ID NO: 68465 - DNA, 1338 bp, Neisseria meningitidis; identical to SEQ ID NO: 55394

SEQ ID NO: 68466 - DNA, 351 bp, Neisseria meningitidis; identical to SEQ ID NO: 54616

SEQ ID NO: 68467 - DNA, 1638 bp, Neisseria meningitidis; identical to SEQ ID NO: 55319

SEQ ID NO: 68468 - DNA, 294 bp, Neisseria meningitidis; identical to SEQ ID NO: 40485

SEQ ID NO: 68469 - DNA, 726 bp, Neisseria meningitidis; identical to SEQ ID NO: 61139

SEQ ID NO: 68470 - DNA, 450 bp, Neisseria meningitidis; identical to SEQ ID NO: 60346

SEQ ID NO: 68471 - DNA, 1635 bp, Neisseria meningitidis; identical to SEQ ID NO: 60779

SEQ ID NO: 68472 - DNA, 642 bp, Neisseria meningitidis; identical to SEQ ID NO: 62013

SEQ ID NO: 68473 - DNA, 282 bp, Neisseria meningitidis; identical to SEQ ID NO: 55698

SEQ ID NO: 68474 - DNA, 1089 bp, Neisseria meningitidis; identical to SEQ ID NO: 54909

SEQ ID NO: 68475 - DNA, 1311 bp, Neisseria meningitidis; identical to SEQ ID NO: 55587

SEQ ID NO: 68476 - DNA, 912 bp, Neisseria meningitidis; identical to SEQ ID NO: 43889

SEQ ID NO: 68477 - DNA, 2256 bp, Neisseria meningitidis
atgggacagtacaagaagctttggtacttgctgtttgccgttctggcggtatgctttaccattcttggctatatgggcagcgaggtttacaaaaaagccccgccttaccccgaacaggtcgtttccgcatccggcaaggtcttgatgacgaaagacgatattttggcaggtcagtctgcatggcagactaccggcggtatggaggtcggttcgattctgggccacggcgcatatcaggctccggactggacggcggactggctgcatcgtgagttggttgcctggttggatctgactgcgcaagaaacttacggtaaaaaatttgacgaagtttctcctgaagaacaagctgttctgaaaacacgtttggctgacgaataccgcaaccaaagccgtgttaaggaagatggttctgttgttgtcagcgaaacccgcgtgaaagccatcgaaagcatcctgccttactaccacggtgtgtacagcgacgatcctaagttccaaaccactcgcgaacactttgcaatgaaaaacaatacattgccaagccaagaagcgcgtgaaaaactgttcaacttcttcttctggacttcttggtctgcttcgaccaaccgtcctgacgagaattttacttacaccaacaactggccgcacgaacctttgatcaacaacgtaccgaccactgaaaactatatgtggtcattcaccagcgttgttcttctgctgatgggcatcggtttgctgatgtggggttattccttcctgaccaaacacgaagaagtggaagtgccgtctgaagacccgatttccaaaatccaactgaccccttcgcaaaaagcattgggcaaatacgtcttcctgacggtcgccctgtttgtggtacaagtattgctgggcggcctgaccgcacactacaccgtcgaaggccagggtttctacggtatcgacgaggcgttgggctttgaaatgtccgactggttcccctacgccctgacccgtacttggcacatccaatccgctatcttctggattgcaaccggctttttgacggcaggtttgttcctcgcgccgattgtcaacggcggcaaagatcccaagttccaacgtgccggtgtgaacttcctctatatcgccctcttcatcgtggtcggcggttcttacgcgggcaacttcttcgcgttgacgcacatccttccccccgaatttaatttctggttcggacaccaaggttacgaatacctcgatttgggtcgtttctggcaactcctgctgatggtcggactgctgttgtggctgttcctgatgttgcgctgcacggtttccgccttcaaagaaaaaggcgtggacaaaaacctgctggcaatctttgtcgcttctatggtcggtgtgggcgtgttctacgcaccgggactgttctatggcgaaaaatccccgattgccgtaatggaatactggcgttggtgggtggttcacctgtgggtggaaggcttctttgaagtatttgccactgccgccttcgcatttgtcttctacaatatgggctttgtccgccgcagtaccgccactgcctccactttggccgctgccgccatctttatgttgggcggcgttccgggtacgctgcaccacctgtacttctccggctctacctccgcctctatggcaatcggcgcctgcttctccgctttagaagtcgtgccgctggtgttgctgggtcgtgaagcatacgagcattggtcttaccaacacctgtccgactgggcgaaacgcctgcgttggccgctgatgtgcttcgttgcagtcgccttctggaatatgatcggtgccggcgtattcggcttcctgatcaatccgccgatttccctgttctatatccaaggtttgaacacttctgccgttcacgcgcacgccgccttgttcggtgtgtacggtttcttggcattgggcttcgtattgctggttgcccgttatttgaaaccgaacgtgcagtttgacgacaaactgatgacttggggcttctggctgctgaacggcggtttggtgggtatgattgccatcagcctgttgccggttggcgtgattcaggcatacgcctccatcacgcacggtctgtggtatgcgcgtagcgaagagttcctgcaaatggaaatcttggatactctgcgttgggttcgtactgctgctgacttgatcttcatcggcggtgcaatctgtgtcgccatccaagccactaaaatcgtattcggccgcgacaaataa

SEQ ID NO: 68478 - DNA, 1002 bp, Neisseria meningitidis; identical to SEQ ID NO: 60373

SEQ ID NO: 68479 - DNA, 1281 bp, Neisseria meningitidis; identical to SEQ ID NO: 50418

SEQ ID NO: 68480 - DNA, 1143 bp, Neisseria meningitidis; identical to SEQ ID NO: 60897

SEQ ID NO: 68481 - DNA, 897 bp, Neisseria meningitidis; identical to SEQ ID NO: 54990

SEQ ID NO: 68482 - DNA, 408 bp, Neisseria meningitidis; identical to SEQ ID NO: 54784

SEQ ID NO: 68483 - DNA, 1296 bp, Neisseria meningitidis; identical to SEQ ID NO: 61054

SEQ ID NO: 68484 - DNA, 342 bp, Neisseria meningitidis; identical to SEQ ID NO: 37417

SEQ ID NO: 68485 - DNA, 315 bp, Neisseria meningitidis; identical to SEQ ID NO: 37950

SEQ ID NO: 68486 - DNA, 444 bp, Neisseria meningitidis; identical to SEQ ID NO: 54598

SEQ ID NO: 68487 - DNA, 1524 bp, Neisseria meningitidis; identical to SEQ ID NO: 60744

SEQ ID NO: 68488 - DNA, 1002 bp, Neisseria meningitidis; identical to SEQ ID NO: 60956

SEQ ID NO: 68489 - DNA, 267 bp, Neisseria meningitidis; identical to SEQ ID NO: 38160

SEQ ID NO: 68490 - DNA, 567 bp, Neisseria meningitidis; identical to SEQ ID NO: 37899

SEQ ID NO: 68491 - DNA, 1539 bp, Neisseria meningitidis; identical to SEQ ID NO: 54475

SEQ ID NO: 68492 - DNA, 993 bp, Neisseria meningitidis
atgccgtctgaaacagtttgtccgttttcagacggcatttccgttacacacccatccccttatacagtacgaccctattccgaaggtctgttaagaaagcccgttatgccctaccaacaaatcaccgtcaacgtcaacgatgccgtcgccgaacgcctcgccgacgcgctgatggaacacggcgcactctccgccgccatcgaagatgcctacgccggcacgcaaaacgaacaggcgattttcggcgaacccggtatgcccgccgaacaaatctggcagcagagcaaagtcatcgccctgttcggcgaacacgacgaagccgccgccatcatccaaaccgccgcacaagaatgcggattaaaagacttggcatacaccggcgaaacccttgaagaccaagactgggtacgcctgacccaagcgcaattcgaccccatccaaatttccgaacgcctgtggattaccccctcttggcacgaagcccccgaaggcactgccgtcaacctccgcctcgatcccggcctcgccttcggcaccggcagccacccgaccacgcgcctctgcctcaaatggctggatacgcaactcaaaaacggcgaaagcgtcctcgactacggctgcggttcgggcatcctgaccatcgccgccctcaaactcggtgcaggttccgccgtcggcgtggatattgacgaacaggccgtccgcgccggcagggacaacgccgcgcaaaacaacgtcgatgcacaattcttcctgcccgacggtctgcctcaagggcaattcgacgtagttgtcgccaacatcctcgccaaccctttgcgtatgctcggcgaaatgctcgcagcccgcaccaaacagggcggacgcatcgtgttgtccggtttgttggacgaacaggccgaagaactcggcggcatttacagccaatggttcgacctcgacccggcggaaaccgaagaaggctgggcgcgcttgagcggcgtaaaacgctga

SEQ ID NO: 68493 - DNA, 966 bp, Neisseria meningitidis; identical to SEQ ID NO: 60515

SEQ ID NO: 68494 - DNA, 684 bp, Neisseria meningitidis; identical to SEQ ID NO: 46781

SEQ ID NO: 68495 - DNA, 864 bp, Neisseria meningitidis; identical to SEQ ID NO: 53312

SEQ ID NO: 68496 - DNA, 747 bp, Neisseria meningitidis; identical to SEQ ID NO: 61543

SEQ ID NO: 68497 - DNA, 672 bp, Neisseria meningitidis; identical to SEQ ID NO: 55867

SEQ ID NO: 68498 - DNA, 1662 bp, Neisseria meningitidis; identical to SEQ ID NO: 55596

SEQ ID NO: 68499 - DNA, 753 bp, Neisseria meningitidis; identical to SEQ ID NO: 54232

SEQ ID NO: 68500 - DNA, 828 bp, Neisseria meningitidis; identical to SEQ ID NO: 36245

SEQ ID NO: 68501 - DNA, 375 bp, Neisseria meningitidis; identical to SEQ ID NO: 38650

SEQ ID NO: 68502 - DNA, 1371 bp, Neisseria meningitidis; identical to SEQ ID NO: 60945

SEQ ID NO: 68503 - DNA, 1296 bp, Neisseria meningitidis; identical to SEQ ID NO: 64413

SEQ ID NO: 68504 - DNA, 1497 bp, Neisseria meningitidis; identical to SEQ ID NO: 61013

SEQ ID NO: 68505 - DNA, 1149 bp, Neisseria meningitidis
atgccgacaatgggggcggagatgaatacacggaatatgcgctatattcttttgacaggactgttgccgatggcatccgcttttggagagaccgcgctgcaatgcgccgctttgacggacaatgttacgcgtttggcgtgttacgacaggatttttgcggcacagcttccgtcttcggcaggacaggaagggcaggagtcgaaagctgtactcaatctgacggaaaccgtccgcagcagcctggataagggcgaggcggtcattgttgttgaaaaaggcggggatgcgcttcctgccgacagtgcgggcgaaaccgccgacatctatacgcctttgagcctgatgtacgacttggacaaaaacgatttgcgcgggctgttgggcgtacgcgaacacaatccgatgtaccttatgccgctctggtacaacaattcgcccaactatgccccgagttcgccgacgcgcggtacgactgtacaggaaaaattcggacagcagaaacgtgcggaaaccaaattgcaggtttcgttcaaaagcaaaattgccgaagatttgtttaaaacccgcgcggatctgtggttcggctacacccaaagatccgattggcagatttacaaccaaggcaggaaatccgcgccgttccgcaatacggattacaaacctgaaattttcctgacccagcctgtgaaggcggatttgccgttcggcggcaggctgcgtatgctcggtgcgggttttgtccaccagtccaacggacagagccgtcccgaatcgcgttcgtggaacaggatttacgccatggcaggcatggaatggggcaaattgacggtgattccgcgcgtgtgggtgcgtgcgttcgatcagagcggcgataaaaacgacaatcccgatattgccgactatatggggtatggcgacgtgaagctgcagtaccgcctgaacgacaggcagaatgtgtattccgtattgcgctacaaccccaaaacgggctacggcgcgattgaagccgcctacacgtttccgattaagggcaaactcaaaggcgtggtacgcggattccacggttacggcgagagcctgatcgactacaaccacaagcagaacggtatcggtatcgggttgatgttcaacgacttggacggcatctga

SEQ ID NO: 68506 - DNA, 783 bp, Neisseria meningitidis; identical to SEQ ID NO: 61065

SEQ ID NO: 68507 - DNA, 720 bp, Neisseria meningitidis; identical to SEQ ID NO: 54461

SEQ ID NO: 68508 - DNA, 354 bp, Neisseria meningitidis; identical to SEQ ID NO: 36586

SEQ ID NO: 68509 - DNA, 399 bp, Neisseria meningitidis; identical to SEQ ID NO: 41900

SEQ ID NO: 68510 - DNA, 2301 bp, Neisseria meningitidis; identical to SEQ ID NO: 62083

SEQ ID NO: 68511 - DNA, 1188 bp, Neisseria meningitidis; identical to SEQ ID NO: 37286

SEQ ID NO: 68512 - DNA, 1071 bp, Neisseria meningitidis; identical to SEQ ID NO: 60898

SEQ ID NO: 68513 - DNA, 690 bp, Neisseria meningitidis; identical to SEQ ID NO: 54630

SEQ ID NO: 68514 - DNA, 2208 bp, Neisseria meningitidis
gtgctagaatacgccgcccgagaccgccgttcagacggcattccgacgcaccgacagaaacatcacgaccgaaaccaagagaaaaacatggcctatcaagttctcgcccgaaaatggcggcccaaaaccttttccgacctagtcggtcaggaacacgtcgtcaaagccctgcaaaatgccttggacgaaggcaggctgcaccacgcctacctgctgaccggtacgcgcggcgtgggcaaaaccaccatcgcccgcatccttgccaaaagcctcaactgcgaaaacgcgcaacacggcgaaccttgcggcgtatgcgaaagctgtacgcagatcgatgccggacgctatgtcgacctgctcgaaatcgacgccgcctccaacacaggcatcgacaacatccgcgaagtcttggaaaacgcccaatacgcgccgaccgccggcaaatacaaagtctatatcatcgacgaagtgcatatgctttccaaaagcgcgttcaacgctatgctcaaaacgctggaagagccgcccgaacacgtcaaattcatccttgccacgaccgatccgcacaaagtccccgttaccgtattaagccgctgcctgcaattcgtcttacgcaatatgaccgcgcagcaggttgccgaccaccttgcccacgtcctcgacagcgaaaaaatcgcctacgccccccccgccctgcaacttttgggacgcgccgccgccggatcgatgcgcgatgccttgagcctgctcgaccaagccatcgccatgggttcgggcagcgttgccgaacaagacgtccgccaaatgatcggtgcggtcgataaacaatacctgtacgaactgctgacaggcatcgtcaaccaagacggcgaagccctgctggcaaaagcacaggaaatggctgcgtgtgccgtcggctttgacaacgccttgggcgaacttgccatactgctgcaacacctcgccctgatacaggcagtgccgaatgccttggcgcacgacgaccccgattccgatattttgcaccgcctcgcccaaaccataagcggcgaacaaatccagctttactaccaaatcgccgtccacggcaaacgcgacctgagcctcgcccccgacgaatacgccggctttatgatgaccctgctgcgtatgctggcgttcgcacccttggcggcaacatcgtgtgatgcaaacgccgtgattgaaaataccgaacttcaatccccatcggcacaaaccgccgaaaaggaaaccgccgcaaaaaagccccaaccgcgccctgaaacggaaaccgcccaaacatccgttcagacggcatccgcagcggcaatgccgtctgaaagcaaaactgccgaacccgtttccaatcaagaaaacaacgatgttccgccttgggaagacgcgccggacgaagcccaaaccgcagccggcacggcgcaaacgtcggcaaaaagcattcagacggcatccgaagccgaaacgccgcccgaaaaccaagtttccaagaacaaggcagccgacaacgaaaccaatgcccccttgtccgaaacgccgtctgaaaaccccattcaggcaacaccgaataatgaagccgttgaaacggaaacatttgcacacgaagcccctgcagaacctttctacggttacggctttccggataatgactgccccgtagaagacaacgcagaaatcccgccgcccgattgggaacacgccgcccctgccgatgcggaagaagaaaacaacgccgacgaaggcagcaacgacgaaaacaacacgccgtccgccccgccgcccgaattttccaccgaaaactgggcagccatcgtccggcatttcgcccgcaaactcggcgcggcgcaaatgccggcgcaacactccgcgtggacggaataccatcccgacaccggcctgatggttttggcgatgaccgccgaagcccgcgccaccgccgacaaaaaacgcctcgacaaaatccgcgacacccttgcccaagcctacgggctgcaactcaccctgcaaacccaagactggcgcgacgaagccggcagggaaacccccgcgatgcaggacaagcgcgtccaagccgaagacaggcaaaaagcacaagcattgctcgaagccgaccccgccgcacaaaaaatcctccaagcattcggcgcgcaatggcagcccgaatcactggaattggcagcaaaccggccgtaa

SEQ ID NO: 68515 - DNA, 1506 bp, Neisseria meningitidis; identical to SEQ ID NO: 52718

SEQ ID NO: 68516 - DNA, 2760 bp, Neisseria meningitidis
atgaaaagaatgttatttaacgcaacgcaggccgaagagctgcgcgttgccatcgtcgacggacaaaacctgctggatttggacatcgaaacgctgggcaaagaacagcgcaaaggcaatatctacaaaggcatcattacccgcatcgagccgtcgctggaagcgtgtttcgtggattacggaaccgaccgccacggcttcttgccgtttaaagaagtctcccgctcatacttccaagactacgaaggcggacgcgcgcgcatccaagacgtgctcaaagaaggcatggaagtcatcgtccaagtcgaaaaagacgagcgcggcaacaaaggcgccgcgctgaccaccttcatcagcctcgccggacgctatctggtattgatgccgaacaacccgcgcggcggcggcgtatcccgccgtatcgaaggtgaagagcgtcaagagttgaaagccgccatggcggaactcgacattccgaacggcatgagcatcatcgcccgtaccgccggcatcggccgcagcgcggaagagttggaatgggacttgaactacctcaaacaactctggcaggcgattgaagaagcaggaaaagcgcatcacgacccctacctgctctttatggaaagctcgctgctgatccgagccatccgcgactatttccgccccgacatcggcgagattttggtggacaatcaagaagtttacgaccaagttgccgagttcatgagctacgtcatgccgggcaatataggccgtctgaaactctacgaagaccacacgccgctgttttcccgcttccaaatcgaacaccaaatcgaaagcgcgttttcgcgcagcgtcagcctgccctccggcggcgcgatcgtcatcgaccataccgaagccctcgtctccatcgacgtgaactccgcacgcgccactcgcggcgcagacattgaagacaccgcgttcaaaaccaatatggaagccgccgaagaagtcgcccgacaaatgcgcctgcgcgacttgggcggcttggtcgtcatcgacttcatcgacatggaaaaccccaaacaccagcgcgatgtggaaaacgtcctgcgcgacgcgctcaaaaaagaccgcgcccgcgtgcagatgggcaaactctcccgtttcggacttttagaattgagccgccaacgtttgaaaccggctttgggcgaaagcagccacgttgcctgtccgcgctgcgccggcaccggcgtgattcggggcatcgaatccaccgccctgcacgttttacgcatcattcaagaagaagcgatgaaggacaacaccggagaagtgcgcgcacaagtgcccgtcgatgtcgccaccttcctgctgaacgaaaaacgcgccgagctgtttgcgatggaagagcgtttggatgtcaacgtcgtcctgattccgaacatccacctcgaaaatccgcactacgaaatcaaccgcatccgcaccgacgacgtagaagaagacggcgaaccgagctacaaacgcgtcgccgagccggaagaagacgaatccgccaaaccgttcggcggcgaaaaagccaaagccgcccgtcccgaacccgccgtcaaaggcgtgcgccacaccagccccgccccgactgccgcccccgagaaaaaaacctcttggtgggacagcttcaaagcatggctcaaacgcattttcggcggcagcgaaacccaagccgcgcccgctgccgaaacctccgaaaaacgcagcacggcaaaccgcagcggcagccgcgccaacaaccgccgccaaaacccgcgccgcagcaaacgcgaaggcagcaaagtagaagtccgcgaagtggcaggcaaaactgccggacaggaagcgcgtgccgacaaagccgaaacgcgcaacaacggcaaccgccgccgcaatgaacgcggcgaccgtgccgccgaacgcgccaacgaagcggaaatccaaagccgcaacgtacagcctgccgcaaccgttgcagatgccgcaccgtccgaaaccgaaatgcaaaccggcaaacgccgccgcaacggcagccgcagcgaacgcagccaaaccgcgccggaaaccgccgccgttgccgaaacagccgttcagacagcggaaaacacgccgtccgaaccgcataccgcagaagacaaaggcagcaagcccaaatccgaacgcaaccgccgcgaacgcgacagccgcgacgccaaagaacgccgcgagcgcaacaatcagcgcgaccgccgtcaaaacggcaaaaaacgcaatatcccgtctgccgccaaaatcgagcagtacctgaatattcacgacaccgccgacaaagtccgttccgccgccgcgcacgttttcggcgaaaccgacgcaaacgcgccgattaccgtcagcattgccgatccggttgcagaaagggatcttccgacagcatctcccgccgtttcaaacggcgacgcaccggtttatgatgcggcggaaaaaatccgccgtgccaccgccgccatcctgcccgaaggcgcgacaccgaaagccgaagcacaggaaatgccgtctgaaaccgcaacctttacggctgcggcggaacaggcacgggaaaccgcacaaaccggcggactcgtcctgatcgaaaccgaccctgccgcattgaaggcatgggcggcacaacccgaagtccaaaccggacgcggtttgcgccgttccgaacagcccaagccgtctgaagtcgcaaccgtccctgccgaagaaatgatccaagtcgaaacccggcaaggctga

SEQ ID NO: 68517 - DNA, 678 bp, Neisseria meningitidis; identical to SEQ ID NO: 61606

SEQ ID NO: 68518 - DNA, 264 bp, Neisseria meningitidis; identical to SEQ ID NO: 39198

SEQ ID NO: 68519 - DNA, 2376 bp, Neisseria meningitidis; identical to SEQ ID NO: 60758

SEQ ID NO: 68520 - DNA, 621 bp, Neisseria meningitidis; identical to SEQ ID NO: 55198

SEQ ID NO: 68521 - DNA, 1545 bp, Neisseria meningitidis; identical to SEQ ID NO: 55911

SEQ ID NO: 68522 - DNA, 1269 bp, Neisseria meningitidis; identical to SEQ ID NO: 51779

SEQ ID NO: 68523 - DNA, 5979 bp, Neisseria meningitidis
atgaataaaggtttacatcgcattatctttagtaaaaagcacagcaccatggttgcagtagccgaaactgccaacagccagggcaaaggtaaacaggcaggcagttcggtttctgtttcactgaaaacttcaggcgacctttgcggcaaactcaaaaccacccttaaaactttggtctgctctttggtttccctgagtatggtattgcctgcccatgcccaaattaccaccgacaaatcagcacctaaaaaccagcaggtcgttatccttaaaaccaacactggtgcccccttggtgaatatccaaactccgaatggacgcggattgagccacaaccgctatacgcagtttgatgttgacaacaaaggggcagtgttaaacaacgaccgtaacaataatccgtttgtggtcaaaggcagtgcgcaattgattttgaacgaggtacgcggtacggctagcaaactcaacggcatcgttaccgtaggcggtcaaaaggccgacgtgattattgccaaccccaacggcattaccgttaatggcggcggctttaaaaatgtcggtcggggcatcttaactaccggtgcgccccaaatcggcaaagacggtgcactgacaggatttgatgtgcgtcaaggcacattgaccgtaggagcagcaggttggaatgataaaggcgaagccgactacaccggggtacttgctcgtgcagttgctttgcaggggaaattacagggtaaaaacctggcggtttctaccggtcctcagaaagtagattacgccagcggcgaaatcagtgcaggtacggcagcgggtacgaaaccgactattgcccttgatactgccgcactgggcggtatgtacgccgacagcatcacactgattgccaatgaaaaaggcgtaggcgtcaaaaatgccggcacactcgaagcggccaagcaattgattgtgacttcgtcaggccgcattgaaaacagcggccgcatcgccaccactgccgacggcaccgaagcttcaccgacttatctctccatcgaaaccaccgaaaaaggagcggcaggcacatttatctccaatgatggtcggatcgagagcaaaggcttattggttattgataccggggaggacatcggtttgcgtaacggagcggtcgttcaaaacaacggcaaccgccctgctgctacggtattaaatgccggccgtaatttggttatcgaaagcaaagcaaatgtgaacaatgctaaaggttcgaccaatctgtcgaccggcggccgtaccgtcatcaaggaggccagtattcagactggcactaccgtatacagttccagcaaaggcaacgccgaattaggcaataacacacgcattaccggggcagatgttaccgtattatccaacggcaccatcagcagttccgccgtaatagatgccaaagacaccgcacacatcgaagcaggcaaaccgctttctttggaagcttcaacagttacctccgatatccgcttaaacggaggcagtatcaagggcggcaagcagcttgctttactggcagacgataacattactgccaaaactaccaatctgaatactcccggcaatctgtatgttcatacaggtaaagatctgaatttgaatgttgataaagatttgtctgccgccagcatccatttgaaatcggataacgctgcccatattaccggcaccagtaaaaccctcactgcctcaaaagacatgggtgtggaggcaggctcgctgaatgttaccaataccaatctgcgtaccaactcgggtaatctgcacattcaggcagccaaaggcaatattcagcttcgcaataccaagctgaacgcagccaaggctctcgaaaccaccgcattgcagggcaatatcgtttcagacggccttcatgctgtttctgcagacggtcatgtatccttattggccaacggtaatgccgactttaccggtcacaataccctgacagccaaggccgatgtcaatgcaggatcggttggtaaaggccgtctgaaagcagacaataccaatatcacttcatcttcaggagatattacgttggttgccggcaacggtattcagcttggtgacggaaaacaacgcaattcaatcaacggaaaacacatcagcatcaaaaacaacggtggtaatgccgacttaaaaaaccttaacgtccatgccaaaagcggggcattgaacattcattccgaccgggcattgagcatagaaaataccaagctggagtctacccataatacgcatcttaatgcacaacacgagcgggtaacgctcaaccaagtagatgcctacgcacaccgtcatctaagcattaccggcagccagatttggcaaaacgacaaactgccttctgccaacaagctggtggctaacggtgtattggcactcaatgcgcgctattcccaaattgccgacaacaccacgctgagagcgggtgcaatcaaccttactgccggtaccgccctagtcaagcgcggcaacatcaattggagtaccgtttcgaccaaaactttggaagataatgccgaattaaaaccattggccggacggctgaatattgaagcaggtagcggcacattaaccatcgaacctgccaaccgcatcagtgcgcataccgacctgagcatcaaaacaggcggaaaattgctgttgtctgtaaaaggaggaaatgcaggtgcgcctagtgctcaagtttcctcattggaagcaaaaggcaatatccgtctggttacaggagaaacagatttaagaggttctaaaattacagccggtaaaaacttggttgtcgccaccaccaaaggcaagttgaatatcgaagccgtaaacaactcattcagcaattattttcctacacaaaaagcggctgaactcaaccaaaaatccaaagaattggaacagcagattgcgcagttgaaaaaaagctcgcctaaaagcaagctgattccaaccctgcaagaagaacgcgaccgtctcgctttctatattcaagccatcaacaaggaagttaaaggtaaaaaacccaaaggcaaagaatatctgcaagccaagctttctgcacaaaatattgacttgatttccgcacaaggcatcgaaatcagcggttccgatattaccgcttccaaaaaactgaaccttcacgccgcaggcgtattgccaaaggcagcagattcagaggcggctgctattctgattgacggcataaccgaccaatatgaaattggcaagcccacctacaagagtcactacgacaaagctgctctgaacaagccttcacgtttgaccggacgtacgggggtaagtattcatgcagctgcggcactcgatgatgcacgtattattatcggtgcatccgaaatcaaagctccctcaggcagcatagacatcaaagcccatagtgatattgtactggaggctggacaaaacgatgcctataccttcttaaaaaccaaaggtaaaagcggcaaaatcatcagaaaaaccaagtttaccagcacccgcgaccacctgattatgccagcccccgtcgagctgaccgccaacggtatcacgcttcaggcaggcggcaacatcgaagctaataccacccgcttcaatgcccctgcaggtaaagttaccctggttgcgggtgaagagctgcaactgctggcagaagaaggcatccacaagcacgagttggatgtccaaaaaagccgccgctttatcggcatcaaggtaggtaagagcaattacagtaaaaacgaactgaacgaaaccaaattgcctgtccgcgtcgtcgcccaaactgcagccacccgttcaggctgggataccgtgctcgaaggtaccgaattcaaaaccacgctggccggtgccgacattcaggcaggtgtaggcgaaaaagcccgtgtcgatgcgaaaattatcctcaaaggcattgtgaaccgtatccagtcggaagaaaaattagaaaccaactcaaccgtatggcagaaacaggccggacgcggcagcactatcgaaacgctaaaactgcccagcttcgaaagccctactccgcccaaattgtccgcacccggcggctatatcgtcgacattcccaaaggcaatctgaaaaccgaaatcgaaaagctggccaaacagcccgaatacgcctacctgaaacagcttcagacggccaagaacgtcgattggaaacaggtacagctggcgtacgacaaatgggactataagcaggaaggcttgaccggagccggtgcagcgattgtggtgattattgtaaccgctctaacttatggatacggagcggctgcagcgggtagcgtaactgccgcaggaagtagtacagccgcagctgcaacaacgacagcggcagcaactaccactgtttctactgcagctgccatgcaaaccgcagctttagcctccttgtatagccaagcagctgtagccatcatcaataataaaggcgatgtaggcaaagcattaaaagatctcggcaccagtgatacggtcaagcagattgttacttccgcactgacggcgggtgcattaaaccagatgggagcagatattgcccaattgaacagcaaggtaagaaccgaactgttcagcagtacgggcaatcaaaccattgccaaccttggaggcagattggccaccaacctcagcaatgcaggtatctcagctggtatcaataccgccgttaacggcggcagcttgaaagacaacttaggcaatgccgcattgggagcattggttaatagcttccaaggggaagccgccagcaaaatcaaaacaaccttcagcgacgattatgttgccaaacagttcgcccacgctttggcgggttgtgttagcggactggtacagggaaaatgtaaagatggggcaattggcgcagcagttggggaaatcgtagctgaatccatacttggcggcagaaaccctgctacactcagcgatgcagaaaagcataaagttatcagttactcgaagattattgcgggcagcgtggcggcactcaacggcggcgatgtgaatactgcggcgaatgcggctgaggtagctgtggtgaataatgctttgaattttgacagcacccctaccaatgcgaaaaagcatcaaccgcagaagcccgacaaaaccgcactggaaaaaatcatccaaagtattatgcctgcacatgcggcaggtgcgatgactaatccgcaggataaggatgctgccatttggataagcaatatccgtaatggcatcacaggcccgattgtgattaccagctatggagtttatgcagcaggttggacagctccgctgatcggtacagcgggtaaattagctatcagcacctgtatggctaatccttctggttgtactgtcatggtcactcaggctgccgaagcgggcgcgggaatcgccacgggtgcggtaacggtaggcaacgcttgggaagcgcctgtgggggcgttgtcgaaagcgaaggcggccaagcaagctgctcctaaagaaacaataaacaatttggcaaatttagccaaagcagaacagcagattttattccgtattgcccaacgcgatacgcaactggatgcatggaagacgggatttaacaatagagtaaggaaaggagcaggcttgcttgatgcaagtaatattccgataaccattaacggaaaaaccatcaaacctgtacaagccataagcttaaagggagcacccgtttacagcggcgtaagcgaacaggagatttttgcgctttatcggcagatgactggccagaatccgaattttagagttttgcctgacggaagattagcaaatggcattatcagtactggagaatgggcaggaacaaaaattgcattaagaaatttttcaaaaacagagaattcaactcaagcacgatggacattagatttgcagaatcctccatcatttattaaaggtactaaattggagcttaaattccaataa

SEQ ID NO: 68524 - DNA, 234 bp, Neisseria meningitidis
atggaagccatcgtctatctcgaagacaacgaatacatcgccttgtgcgacctgttgaaattggccggacttgccgaaagcggcggacaggcgaaggcgttgattgccgaagggttggtgtcgcgcaacggcgaaaccgaaacccgtaaaaccgccaaaatacgcggcggcgaagtcatcgagtttgacggcgcacgcttggaaattgccgatggatacgaccctgaagaataa

SEQ ID NO: 68525 - DNA, 426 bp, Neisseria meningitidis; identical to SEQ ID NO: 60675

SEQ ID NO: 68526 - DNA, 507 bp, Neisseria meningitidis
atggttgacgcttggtctgtccctgattttgaatcgaaaatctgtccgcccgaggcgttggcggcgcgtttggcgttgttgccgcgcccgctggtgtttaccaacggctgtttcgacatcctccacagggggcacgttacttatctggcgcaggcgcgttcgatgggggacgcgttggtgctggcgttgaataccgatgcttcggtgcggcgtctgggcaagggcggtgaccgcccggttaatcctttggagaaccgtgccgccgttgccgccgcgttggaaagtgtggatttggtaacgtggtttgacggggatacgccggcggcgttgattgaggcggtcaaacctgagattttggtcaagggcggcgattgggctgcggataagattgtcggtgcggcagaaacgttggcgcgcggcggtcaggtgttttcaattccgtttctgcaccagacttcgacaacgaagactttggcaaaaatccgtgcggcagagggcggaaaatga

SEQ ID NO: 68527 - DNA, 1815 bp, Neisseria meningitidis; identical to SEQ ID NO: 61392

SEQ ID NO: 68528 - DNA, 2913 bp, Neisseria meningitidis
atgtcttttcagacggcatcagttcagccgtcaggacgcggacttctaccctttgtttatattttaaagaaaagagcgcacgccatgatggacgaaaaactcaatttctcttacctgttcggttcgaacgcaccctacattgaggaattgtacgaggcttttttggaaaaccccgatgcggttgatgaaaaatggaagcagtatttcaccgatttgagcaaacagccggggacggttgctgtcgatgtcgcacacacaccgattcgcgaatcatttgttactttggcgaaaaagaaaattgcatctgccgttgcgggcggtgcggatgaggcaatgctgaaaaagcaagtcagcgttttacggctgatttctgcctatcgtatccaaggcgtgggtgcagcccaacttgatccgctcaaacgtatccccccgcgcgatattgaagccctcgatccgaaattccacggtctgtcagatgccgatatgacgcttcaattcaatatgggcgagggcgattttgccaatcgcggcaaactgcctttgtcccaaatcatcagcaacctcaaacaaacctactgcggccacatcgcattggaatatatctatattcccaataccgaagagcgccgctgggtacgcaattattttgaaagcgtattgtccacaccgcattacaatgccgatcaaaaacgccgtatcttgaaagagatgactgctgccgaaactttggaacgttatctgcataccaaatatgtcggtcagaaacgtttcggtgtcgaaggcggcgaaagcgcgattgccggtttgaactacctgattcaaaacgccagtaaagacggcgtggaagaagtcatcatcggtatggcgcaccgtggccgtctgaatgttttggtgaacattttgggcaaaaaacccggcgatttgtttgccgaatttgaaggtcgtgccgaaatcaaactgcccagcggcgacgtgaaataccatatgggcttcagctccgatattgctaccccgcacggcccgatgcatgtttctttggcgttcaacccgtctcacttagaaatcgtcaacccggtggtggaaggttctgcgcgcgccaaacaaaaacgtttgggcgaaaacggccgcgacaaagtcttgccggtattgattcacggcgactccgcatttatcggtctgggagtcaaccaagcgacattcaacctgtctaaaacgcgcggttataccaccggcggtacggttcatatcgtcatcaacaaccaaatcggctttaccacttccgatatccgcgatacccgttcaaccgtacactgtaccgatatcgcaaaaatggtttccgctccggttatccatgtgaacggcgatgatcctgagcgtgtttgctttgccatccaagccgctttggattaccgcaaaaaattccataaagacatcgtgattgacgttgtctgctaccgtaaatggggtcacaacgagggcgatgatccgaccttgacccaaccgatgatgtacaaaaaagtatcgcaacaccccggtgcgcgtgctttgtacaccgagcaactgattgccgaaggcgtggtaacccaagccgaggcagacggttacatccaagcctaccgtgatgctttggacaaaggcgaacacgtcgagcaaacaacgttgagcaactttcaacgcacgcaaatcgactggagcaaataccaaggcaaagattggcgcgaacacatcgaaaccggtttgcctgccgcagatattgagcgtctcactgagaagtttaccgccgtaccggaaggctttgccctgcatccgactgcaaaacgtgtgattgaagcgcgtaaagccatggcatccggcaaacaagccatcgactggggtatggcggaaaccctcgcatacgccagcctcgtaaccaaaggccatggcgtgcgtatttccggcgaggactctgggcgcggtacattctcacaccgtcatgcggtattgcacgatcaaaaacgcgaaaaatgggacgacggtacttatgtccctctgcgccatatgggcgaaggtatgggcgagttcctggttatcgactccattttgaacgaagaagccgtgatggcgttcgagtacggctttgcctgctccgcgcctgacaagctgaccatttgggaggctcaattcggtgacttcgccaacggcgcgcaagtgactattgaccaattcctgtcttcaggcgaaaccaaatggggtcgtttgtgcggtctgaccaccatcctgccgcacggctacgacggtcaaggccccgagcactcctctgcacgcgtagaacgttggttgcaactgtgttccgagaacaatatgcaagtcatcatgccgtctgaagcgtcgcaaatgttccacctcttgcaacgccaagttttgggttcataccgcaaaccgctggtgattttcatgtccaaacgcctgttgcgcttcaaaggtgcaatgagcccgctggaaaacttcaccgaaggttcgactttccgtccggttatcggtgataccgccgaacgcgcaagcaacggcagcgtgaaacgtgtggtattgtgtgccggtcaggtttactatgacttggaagcaggccgtaccgagcgtaaactggaagatgatgttgcgattgtccgcgttgagcagctgtatccgttcccatacgaggaggttaaagccgaactggcgaaatatccgaacgcaaaatctgtggtttgggcacaagaagagccgaaaaaccaaggtgcgttctaccaaatccgccaccgcatcgaagacgttatcagcgaagagcaaaaactgtcttatgccggtcgtccaagcagcgcatcgcctgcagtgggctactcaagcaaacatattgcccaattgaaacaattggttgaagacgctttggcgttgtaa

SEQ ID NO: 68529 - DNA, 594 bp, Neisseria meningitidis; identical to SEQ ID NO: 60587

SEQ ID NO: 68530 - DNA, 7533 bp, Neisseria meningitidis
atgaataaaactctctatcgtgtaattttcaaccgcaaacgtggggctgtggtagccgttgctgaaactaccaagcgcgaaggtaaaagctgtgccgatagtgattcaggcagcgctcatgtgaaatctgttccttttggtactactcatgcacctgtttgtcgttcaaatatcttttctttttctttattgggcttttctttatgtttggctgtaggtacggccaatattgcttttgctgatggcattattgctgataaagctgctcctaaaacccaacaagccacgattctgcaaacaggtaacggcataccgcaagtcaatattcaaacccctacttcggcaggggtttctgttaatcaatatacacagtttgatgtgggtaatcgcggggcgattttaaacaacagccgcagcaacacccaaacacagctaggcggttggattcaaggcaatctttggttggcaaggggcgaagcacgtgtggttgtaaaccaaatcaacagcagccattcttcacaaatgaatggctatattgaagtgggcggacgacgtgcagaagtcgttattgccaatccggcagggattgcagtcaatggtggtggttttatcaatgcttcccgtgctactttgacgacaggccaaccgcaatatcaagcaggcgcattaacaggctttcaggttcgttcgggtcatattgcgatcacgggacaaggtttggatgcacgtgataccgatttcacgcagatattgagccatgcggttaagattgatgggcctgtgtggggtaaagatgtgcgtgtgtcggcagggaaaaatgatgtctcagctgatggctctatccagtcttcacactcccctgctacgaatataaattccgacaactcactgtatgccatcgatacaggggcattgggcggtatgtatgccggtaagatcaccctgatcagcactgatcgtgatgcatccgtgcgcaatcaggggcaatggtttgcctcagccggcaatgtggcgattgatgcaaatggccgtttagtcaatagtggcacgatggctgccgccaatgcgaaagatacggataatacagcggaacacaaagtcaatatccgcagtcagggcgttgaaaacagcggtacggcggtatcgcaacaaggcactcaaattcacagtcagtcgattcaaaacactggcacattattgtcctcaggcgaaatattgattcacaattcgggcagcctgaaaaatgaaacatcaggcaccattgaagccgctcgtttggctattgataccgacacacttaataatcaaggcaaactctctcaaacaggttcacaaaaactccatattgatgcacaaggcaaaatggataaccgtggccgcatgggtttacaagataccgcaccaaccgcgtcaaatggttcaagcaatcaaaccggcaatagttacaatgcatctttccattcatccactaccacaccaacaacggcaacaggtacgggtactgcaaccgtttctatatcaaacataactgcgcctacctttgctgatgggacaattcgcactcatggtgcactggataattcaggcagtattattgccaatggtcaaacagatgttagtgcgcaacaaggtttaaataatgcaggacaaatagacattcatcagttaaatgcaaaaggttcggcgtttgacaatcacaatggaacaattatcagtgatgcggtccacattcaagccggcagcctgaataatcaaaatggcaacatcacaacacgccaacagttagagattgaaaccgatcaactggataacgctcatggcaagttattatcagcagaaatagcggatttagccgtttcaggcagcctgaacaatcaaaatggcgaaatagcgaccaatcaacaactgattattcacgatggtcagcaatctaccgctgtcattgataatacgaatggcacgatacaatcaggccgtgatgttgctattcaggcaaaatcgttatccaacaacggcacacttgccgctgataataaactggatattgcgttacaagatgatttttatgtagaacgcaatatcgtggcgggcaatgaattgtcgctcagtacacgaggcagcctgaaaaattcacatactttgcaagcaggaaaacgcattcggattaaagcaaataaccttgataatgcagcacaaggcaacattcaatccggcggtgcaacagacattggcacgcagcacaatttaaccaatagaggcttgattgacggacaacaaaccaaaatccaagccgggcaaatgaataatatcggtacaggtcggatttatggcgacaatatcgctattgcggctacccgcttagacaatcaagatgaaaacggtacaggtgccgccattgcggcacgtgaaaacctgaatttaggcatcggacaattaaacaaccgtgaaaacagtctgatttacagcggtaacgatatggcggttggcggcgcattagataccaatggccaagccacaggcaaagcccaaaggatacacaatgccggcgcaaccattgaagccgccggcaaaatgcgtttaggcgtagaaaagctgcacaataccaatgagcatttgaaaacgcagttggtagaaacagggcgcgagcatattgttgattacgaagcatttggacgacacgaattattgcgggaaggcacacaacatgaattaggctggtctgtctataacgatgaatcagaccacttacgcacccctgatggagcggcgcatgaaaattggcataaatacgattatgaaaaagtcacccaaaaaacccaagttacccaaactgcgccagccaaaatcatttcaggtaatgatttaaccattgatggtaaagaagtatttaataccgatagccaaatcatcgccggcggcaatttgcttgtgcaaacagaaaaagacggtttgcataacgagcaaacctttggcgaaaagaaagtattcagtgaaaatggcaaattacacagctattggcgtgagaaacataaaggacgagactcaacgggacatagcgaacaaaattacactttgccggaggaaatcacacgcaacatttcactgggttcatttgcctatgaatcgcatcgcaaagcattaagccatcatgcgcccagccaaggcactgagttgccgcaaagcaacggtatttcgctaccctatacgtccaattcttttaccccattacccagcagcagcttatatattatcaatcctgtcaataaaggctatcttgttgaaaccgatccacgctttgccaactaccgtcaatggttgggtagtgactatatgctggacagcctcaaactagacccaaacaatttacataaacgtttgggtgatggttattacgagcaacgtttaatcaatgaacagatcgcagagctgacagggcatcgtcgtttagacggttatcaaaacgacgaagaacaatttaaagccttaatggataatggcgcgactgcggcacgctccatgaatctcagcgttggcattgcattaagtgccgagcaagtagcgcaactgaccagcgatattgtttggttggtacaaaaagaagttaaacttcctgatggcggcacacaaaccgtattggtgccacaggtttatgtacgcgttaagaatggcgacatagacggtaaaggtgcattgttgtcaggcagcaatacacaaatcaatgtttcaggcagcctgaaaaactcaggcacgattgcagggcgcaatgcgcttattatcaataccgatacgctagacaatatcggtgggcgtattcatgcgcaaaaatcagcggttacggccacacaagacatcaataatattggcggcattctttctgtcgaacagacattattgctcaacgcaggcaacaacatcaacagccaaagcaccgccgccagcagtcaaaatacacaaggcagcagcacctacctagaccgaatggcaggtatttatatcacaggcaaagaaaaaggtgttttagcagcgcaggcaggcaaagacatcaacatcattgccggtcaaatcagcaatcaatcagagcaagggcaaacccggctgcaagcagggcgcgacattaacctagatacggtacaaaccggcaaacatcaagcaacccattttgatgccgataaccatgttattcgcggttcaacgaacgaagtcggcagcagcattcaaacaaaaggcgatgttaccctattgtcagggaataacctcaatgccaaagctgccgaagtcagcagcgcaaacggtacactcgctgtgtctgccaaaaatgacatcaacatcagcgcaggcatcaacacgacccatgttgatgatgcgtccaaacacacaggcagaagcggtggtggcaataaattgattattaccgacaaagcccagagccacaacgaaaccgctcaaagcagcacctttgacggcaggcaagttgtattgcaggcaggaaacgatgccaacatccttggcagcaatgttatttccgataatggcacccggattcaagcaggcaatcatgttcgcattggtacaacccaaactcaaagccaaagcgaaacctatcatcaaacccagaaatcaggattgatgagtgcaggtatcggcttcactattggcagcaagacaaacacacaagaaaaccaatcccaaagcaacgaacatacaggcagtaccgtaggcagcttgaaaggcgataccaccattgttgcaggcaaacactacgaacaaatcggcagtaccgtttccagcccagaaggcaacaatatcatccatgcccaaagcatagacattcaagcggcacacaacaaattaaacagtaataccacccaaacctatgaacaaaaaggcttaacggtggcattcagttcgcccgttaccgatttggcacaacaagcgattgccgtcgcacaaagcagcaaacaagtcggacaaagcaaaaatggtcgtgtcaatgccatggcagctgccaatgcaggctggcaagcctatcaaacaggtaagagtgcacaaaacttagccaatggtacaaccaatgccaaacaagtcagcatctccataacctacggcgaacagcaaaaccgacaaaccacccaagttcaagcaagccaagcccaagcgagtcaaattcaagcaggcggtaaaaccacattaatcgccacaggcgcagcagaacaatccaatatcaacatcgcaggctcagatattgccggcaaagcaggcacaatcctgattgccgataacgacatcacactccaatcagccgagcaaagcaataccgaacgcagccaaaacaaatcgacaggttggaacgcaggtgctgccgtatcattcggacaaggaggctggtcattaggcgttaccgcaggcggcaatgtcggcaaaggctacggcaatggcgatagcgtaacccaccgccatagccatattggcgacaaaggcagccaaacccttatccaaagcggtggcgacactaccatcaaaggcgcgcaagtacgcggcaaaggcgtacaagtcaatgccaaaaacctaagtattcaaagcgtacaagatagagaaacttatcaaagcaaacaacaaaacgccagtgcacaagtgaccgtaggttatggcttcagtgccagtggcgattacagtcaaagcaaaatccgagccgaccatgcttcagtaaccgagcaaagcggtatttatgccggagaagacggctatcaaatcaaggtcggaaaccatacagacctcaaaggcggcatcatcaccagcagccaaagcgcagaagacaagggtaaaaaccgctttcagacggccacccttactaccagcgacattcaaaattacagccaataccaaggaaaaagttttggattgggtgccagcgttgccgtaagcggcaaaacactgggacagggcgcacaaaataaacctcaaaacaaacacctgacaagcgtagccgataaaaacggcgcaagttcatcagtgggttatggcagcgacagcgacagtcaaagcagcatcacgaaaagcggcatcaacacccgcaacatacacatcaccgacgaagcgggacaaatcaggctgacaggcaaaacagcggcacaaaccaaagccgatattgatacaaacgtaaccacagacaccgccgaacgacattcgggcagcttgaagaacaccttcaacaaagaagcggtgcaaagtgaactggatttacaaagggaagtaacccaagagtttgataaaactagacaaggagtgaaacaagaactttatgcagtagtagatagcaaacgagagcaagccacaaaagagagactcaaaaatggtggatatgacaatgataaatctagagcattaaataaggaagctaatgaattagatgaaaaaattcgttggcttgatgcgggattaggactcgtttggggagcagggagttctgatatggcttggagtatgtttgccacaacccaagccgatagagcggtaaggtctgcaactgcacctaaagaaatgtggttccataagaagataatagatgaaaaaacaggtaaagtatcctttgataccagacaaatttggtcattgaatgatttaagcaaggaagaactggcaagcattcaagacacaaatggcaaagttattactgtgtctaatcctggtattttcaataatcgagaagattcattaagcaatgcagcaaaacaaaatcgtaatagtacaaacggtagtggtgttattgcagttatgaatcctccaacagggaaatataaatctgattctaataacaaaataaaagattctttatggctcagttcaagtcttgtttctgaactgatgtatgtcggttacgaccaattaaataataaagtgttccaaggctatttacccaaaaccaattcagaaaaactgaatcaagatatttatcgagaggttcaaaaaatggataatggctggtctgttgataccagtaaccacagtcgtgggggaattacagcaagcgtttccctaaaagattgggtaaacaataaagagcaaaatggcattgccccaatcagaaaagcacgtttctatggtacagccacaaatgtgaagaatgattacgccgatgttttacagaaaaacggctatacctatacgggtgcagacggtaaaacttataacagcggagcctactcaatcgtgcatgataaagattttgtggggaacaaatggatacctttcttgctaggaaataatgagacaacaaaaggagcttgtaagggattttgctattcgcatagcagttattttgcggaagtgcctgaacagtaccaaagggatgcgagcggagagtatgttattagagatggtaaaaaagttgagacagaagcttggaaagattataagtcaatatggggcgaaccgaccgaaaaagatgaaaatggtaaatacatcaacaaatatattcctaaattaatcaacccaaataaaccaaatggagaaaaatatgaagataaaccattttaa

SEQ ID NO: 68531 - DNA, 1380 bp, Neisseria meningitidis; identical to SEQ ID NO: 61434

SEQ ID NO: 68532 - DNA, 1281 bp, Neisseria meningitidis; identical to SEQ ID NO: 60322

SEQ ID NO: 68533 - DNA, 936 bp, Neisseria meningitidis; identical to SEQ ID NO: 61580

SEQ ID NO: 68534 - DNA, 468 bp, Neisseria meningitidis; identical to SEQ ID NO: 50927

SEQ ID NO: 68535 - DNA, 1188 bp, Neisseria meningitidis
atgaataccttactcaaccaactcaaaccctatccctttgcccgactgcgtgaagcgatgcagggcatttccgcccccgaaggtctggaagccgtcccactgcatatcggcgaaccgaaacatccaacaccgaaagtcattacagatgcgctgaccgcctcattgcacgagttggaaaaatatccgctgacggccggtttgcctgaactgcgtcaggcgtgtgcgaactggttaaaacgccgttatgatggcttgacagtggatgcggataatgaaattctgccggttttaggcagtagggaggcgttgttttcttttgttcaaaccgtgttggaccctgtttcagacggcatcaaacccgcaattgtcagcccgaatcccttttatcagatttacgaaggtgcgacacttttgggcggcggtgaaatccattttgccaattgccccgcgccgtctttcaaccccgattggcgtagtatttccgaagaggtttggaaacgcaccaaactggtgttcgtctgctcgcccaacaaccccagcggcagcgtgctggatttggatggatggaaagaagtttttgatttacaggataaatatggtttcattattgcctcggatgaatgctattccgaaatctatttcgacggcaacaaacctttaggctgcctgcaggccgctgcacagttgggtcgaagcaggcaaaaactgcttatgttcaccagtttgtccaagcgttccaacgttccgggcctgcgttccggttttgtcgccggcgatgccgaactgcttaaaaactttctgctttacagaacctatcacggcagtgcaatgagcattcccgtgcagcgcgcaagcattgccgcttgggatgacgaacagcacgttatcgacaaccgccgcctgtatcaggaaaaatttgagcgcgttattcccattttgcaacaggtatttgatgttaaattaccagatgcctcgttttacatttggttgaaagtccccgatggcgacgatttggcatttgcacgcaatttatggcaaaaagccgctatccaagtattgcccggacgctttttggcacgggataccgaacagggcaatcccggggaaggttatgtgcgtatcgctttggttgccgatgtcgcaacttgtgtcaaagctgcggaaaccattgtttccctatatcggtaa

SEQ ID NO: 68536 - DNA, 1593 bp, Neisseria meningitidis
atgagggcgttcgccgtccgcaaccataaaggaagtttcatgaaccggacttatgccaatttctacgaaatgctgaccaccgcctgccgcaaaaacggcaacggcacggcagtgttcgacggcaaggaaaaaaccgcctaccgcgcgctcaagcaggaggccgaagccgtcgcggcgtatctgcaaaatatcggcgtgaagttcggcgacacggtcgcgctggcggtttccaattccacagaatttattaccgcctatttcgccatctccgccatcggcgcggtcgccgtaccgatgaacacatttttgaaaaacagcgaatacgcgtatatcctgaacgactgcaaggcgcgcttcctgttcgcctcggtcggcctgtcaaaagaattggcgggcttgaaggcgcaaacgcccatcgaaaaaatcatttggacgggcaaaagccggccggtcggcgaaacggcggaaggcgatgccttttttgaagacgtgcgccgcttccccgaaaaacccgacttgggccgacaaccccggataaatgatttggcacacatcatctacacctccggcacgacggggcatcccaaaggcgcgctaatcagttacgccaacctgttcgccaacctgaacggcatcgaacgcatctttaaaatttccaaacgcgaccgctttatcgttttcctgccgatgttccacagcttcacgctgacggctatggtgctgctgccgatttatatggcgtgttcgattattttggtcaaatccgttttcccgttttccaatgttttgaaacagaccctgctcaaacgcgcgaccgtgtttttgggcatacccgcgatttacaccgcgatgagcaaggcgaaaatcccttggtatttcagatggttcaaccgcattcgcctgtttatcagcggcggcgcgcctttggcggaacaaaccatcctcgatttcaaagccaagttcccccgcgccaaattgctggaaggctacggactgagcgaagcctctcccgtcgtcgccgtcaatacgcccgagaggcaaaaagcccgcagcgtcggcatccccctgcccggtttggaagccaaagccgtcgatgaagaattggtcgaagtgccgcgcggcgaagtgggcgaactgattgtcaggggcggttcggtgatgcggggctacctcaatatgcctgccgccaccgatgaaaccatcgtcaacggctggttgaaaacgggcgatttcgttaccatagacgaagacggcttcatctttatcgtcgaccgcaaaaaagatttgattatttccaaaggtcaaaatgtctatccgcgcgagatcgaagaagaaatctacaaactcgatgccgtcgaagccgccgccgtcatcggcgtgaaagaccgttatgccgacgaggaaatcgtcgccttcgtccaattgaaggaaggtatggatttgggcgagaacgaaatccgccgccacctgcgtaccgtgctggcaaatttcaaaatccccaaacaaatccactttaaagacgggctgccgcgcaacgctacgggcaaggtattgaaacgggtgttgaaggagcagtttgacggaaacaaatga

SEQ ID NO: 68537 - DNA, 615 bp, Neisseria meningitidis; identical to SEQ ID NO: 61423

SEQ ID NO: 68538 - DNA, 1407 bp, Neisseria meningitidis; identical to SEQ ID NO: 37873

SEQ ID NO: 68539 - DNA, 747 bp, Neisseria meningitidis; identical to SEQ ID NO: 61001

SEQ ID NO: 68540 - DNA, 447 bp, Neisseria meningitidis; identical to SEQ ID NO: 45533

SEQ ID NO: 68541 - DNA, 513 bp, Neisseria meningitidis
atgactggattcatttctaacgcatttataggcctaaaagaagcaggatcacttttaaaagggtttaaccagctcaaaacagaggcagaggtagcgcaaaaaaccatcgaacttaatcaaatcattgctggtattcaaactgatttatttgaagcccaatcttcttatacggcggcaattagccgtatagatgagttggaaaaagaactggtggcagtaaaaaattggtctacagagaagcaacgctaccaattgtatgaacttgctcctggttctttcgtctatcgattgaaaacagagatggcgaacagcgagccaattcatgatatttgtccccaatgttacgagcagggtgtcaaatcgattcttcaattcaatgggtatgaaggtgcttttcataaatattcctgttcccgttgccaaaccataatattgggagagcgtttaaagtcagatgttgaagtattttcagtaggaggatcacgttatgggagattgatagacggctattaa

SEQ ID NO: 68542 - DNA, 627 bp, Neisseria meningitidis
atgaacgttaacgttatcaaccatccgctcgtccgccacaaattaaccctgatgagggaggcagattgcagcacctacaaattccggacgcttgccatcgagctggcgcgcctgatggcatacgaggcaagccgtgattttgaaatcgaaaaataccttatcgacggatggtgcggtcagattgaaggcgatcgcatcaagggcaaaacattgaccgtcgttcccatcctgcgtgcaggtttgggtatgcttgacggcgtactcgacctgattccgactgccaaaatcagcgtagtcggactgcagcgcgacgaggaaacgctgaaacccgtttcctacttcgagaaattcgtggacagcatggacgaacgtcctgccctgattatcgacccgatgctggcgacgggcggttcgatggtggcaactatcgacctgttgaaagccaagggctgcaaaaacatcaaggcactggtgctggttgccgcgcccgagggtgtgaaggcggtcaacgacgcgcatcccgacgttacgatttacaccgccgcgctcgacagccacttgaacgagaacggctacatcatccccggcttgggcgatgcgggcgacaagattttcggcacgcgctaa

SEQ ID NO: 68543 - DNA, 1404 bp, Neisseria meningitidis; identical to SEQ ID NO: 54458

SEQ ID NO: 68544 - DNA, 390 bp, Neisseria meningitidis; identical to SEQ ID NO: 61823

SEQ ID NO: 68545 - DNA, 747 bp, Neisseria meningitidis; identical to SEQ ID NO: 47877

SEQ ID NO: 68546 - DNA, 1155 bp, Neisseria meningitidis; identical to SEQ ID NO: 55553

SEQ ID NO: 68547 - DNA, 537 bp, Neisseria meningitidis; identical to SEQ ID NO: 55520

SEQ ID NO: 68548 - DNA, 1059 bp, Neisseria meningitidis; identical to SEQ ID NO: 40263

SEQ ID NO: 68549 - DNA, 411 bp, Neisseria meningitidis; identical to SEQ ID NO: 54400

SEQ ID NO: 68550 - DNA, 828 bp, Neisseria meningitidis; identical to SEQ ID NO: 61476

SEQ ID NO: 68551 - DNA, 681 bp, Neisseria meningitidis; identical to SEQ ID NO: 55623

SEQ ID NO: 68552 - DNA, 966 bp, Neisseria meningitidis; identical to SEQ ID NO: 61349

SEQ ID NO: 68553 - DNA, 843 bp, Neisseria meningitidis
atgtcgggaggggttatgcctgaattgccggaagtggaaacgacgttgcgcggcatcgcgccgcatattgaagggaaaacggtggaagccgtggtattgcgccaattgaagctgcgctggcagattaatcccgatttgggggagattttgtccggccggcaggtgttgtcctgcggcaggagggcgaaatacctgcttatccgctttcaaacgggcgtgctgctgattcacttggggatgtcgggcagcttgcggatttttacgccgtcggacggacgtatcggcaggccggacagacacgatcacgtcgatattgtgttttcagacggcacggtcatgcgttaccgcgatccgagaaagttcggcgcgatactttggtatgagggaatcgaagaacatcatccgctgttggaaaaactggggccggagcctttgtcggaggcattttgcacggattatctgtatgtgaggctgaaggcgcagaagcgcgcggtcaaacttgccctgatggacaatgcggtcgtggtcggtgtgggcaatatttatgccaatgagagcctgttcagagcgggcatttcgccccaccgtcctgccaaccgtctgaaaaagaaagagtgtgcgcttttggttgaaaccgtcaaagcggtgttgcggcgcgccattgaaacgggcggcagtaccttgagggattttgtggacagcgacggcaaaagcggctacttccaacaggaatatacggtgtacgggcggcacaatcagccgtgcccccagtgcggcggtttggttgtgaaagaaactttggggcagcgcggcacgttttactgcccgaattgtcagaaatag

SEQ ID NO: 68554 - DNA, 840 bp, Neisseria meningitidis; identical to SEQ ID NO: 59829

SEQ ID NO: 68555 - DNA, 372 bp, Neisseria meningitidis; identical to SEQ ID NO: 36794

SEQ ID NO: 68556 - DNA, 345 bp, Neisseria meningitidis; identical to SEQ ID NO: 36231

SEQ ID NO: 68557 - DNA, 564 bp, Neisseria meningitidis; identical to SEQ ID NO: 54839

SEQ ID NO: 68558 - DNA, 1023 bp, Neisseria meningitidis; identical to SEQ ID NO: 55836

SEQ ID NO: 68559 - DNA, 1545 bp, Neisseria meningitidis; identical to SEQ ID NO: 55382

SEQ ID NO: 68560 - DNA, 303 bp, Neisseria meningitidis; identical to SEQ ID NO: 37853

SEQ ID NO: 68561 - DNA, 1575 bp, Neisseria meningitidis; identical to SEQ ID NO: 61953

SEQ ID NO: 68562 - DNA, 171 bp, Neisseria meningitidis
atggcgcaatatatgtgcggcccctgcggctggatttacgatgaagaacacggcgaccccgaacacggcatcccccccgggacaaagtttgaagacattcccgacgactggaaatgccccgaatgcggcgtaggtaaagaagatttctacctgttggatttcgtgatatag

SEQ ID NO: 68563 - DNA, 369 bp, Neisseria meningitidis; identical to SEQ ID NO: 54592

SEQ ID NO: 68564 - DNA, 516 bp, Neisseria meningitidis; identical to SEQ ID NO: 61754

SEQ ID NO: 68565 - DNA, 540 bp, Neisseria meningitidis; identical to SEQ ID NO: 55002

SEQ ID NO: 68566 - DNA, 411 bp, Neisseria meningitidis; identical to SEQ ID NO: 61367

SEQ ID NO: 68567 - DNA, 1224 bp, Neisseria meningitidis
gtgggacgcagaaaactttggtttgccctggcagcagcgggcgttatcggcggtttagtcggcattgtgctgacagaactgatgcacttcatacagcatacggcatacggttatggcgcggacggtgcgtacatctcgttccgcgaaggtgtggcacaggcttccggtatgcggcgcgtcgccatgctgacgctgtgcggcgcgatcgcaggcggcggctggtggttgctgaaagccttgggcaagccgcaaatcgaaatcaaagccgccttgaagcagccgttgcaggggctgccgtttctgacgacggttttccatgttctgctgcaaatcataacggtcggactcggttcaccgctcggacgcgaagtcgcgccgcgcgaaatgaccgccgcgtttgcttcggcaggcggcaaacgcttgggtttggacgaaggcgaaatgcgcctcttgattgcctgtgcgtccggcgcgggtttggcggccgtgtataacgtgccgctcgcctccacacttttcatcctcgaagccatgctgggcatgtggacgcagcaagccgtcgccgccgcgttgctgacttcggtcattgccaccgccgtcgcacgcatcggcttaggcgacgtgcagcaatatcatcccgccaaccttgccgtcaacacctcattactttggttttccgccgtcatcggcccgatactgggcgcaaccgccgtttttttccagagtaccgcccaaaaattccccttcatcaagcgcgacaacatcaaaatcattcccttggccgtctgtatgtttgcactcatcggcgcgattgccgtttggtttcccgaagttttgggcaacggcaaagcaggcaaccaactgacttttggcggtttgaccgactggcaatacgctttggaacttgccgccgtcaaatggccggtcgtcttgatggcgctggcggcaggcgcatacggcggactgattacgccgtcgatgatgcttggcagcaccgtttcttttgctgccgccgccgcgtggaacagtgttttccccgcaatgccgtctgaaagcgcggcagtcgtcggagcggcggtgtttctcggcgtatcgctcaaaatgccgctgaccgccattgtgttcgtattagaactgacctacgcgccgctgtccctgctgctgcctttgtgcatcggcatggcgggggcattgggaacatcgggaaaaatgggcttcaaatga

SEQ ID NO: 68568 - DNA, 1092 bp, Neisseria meningitidis
gtgaagaaaataaggtcgtctgaagagtctgatatgtcaggctatacaggcggcctcgttgtttcaggtggcatatcattaattgacagacttgatattatggaaaatgtaaaccgcatcgttgcagaaggcattgccgcagtagaagctgcgcaagacttcaacgctctagaacaaatcaaagcccgttatcttggcaaaaccggcgagttgaccggacttctgaaaactttggggcaaatgtcgcctgaagagcgcaaaaccataggtgcgcatatcaatgaatgcaaaaaccggtttcagacggcttttaatgccaaacgcgatgccctcaacgaagccaagctgcaagcccgacttgccgccgaagccctcgacattaccctgcccggacgcgctcaggaaggcggcagcctgcatcccgtaaccctgaccttgcaacgtgtggtcgaactctttcacggaatgggtttcgaagtggcggacgggcctgaaatcgaagacgattttcacaatttccaagccctgaacatccctgcaaaccatcctgcccgtgcgatgcaggatacgttttacgttgaaaacggtgatgttttgcgtacgcacacttccccgattcaaatccgctatatgctcgataaaaaagagccgcccatccgcattatcgcccccggccgcgtttaccgtgtggacagcgatgccacgcactcgcctatgttccatcaggcggaaggtttgtgggtagaagagggcgtaacttttgccgatttgaaagcagtgttcacggattttatccgtcgcttctttgaacgcgatgatttgcaagtacgtttccgcccgtctttcttcccgttcaccgaaccgtctgccgaaatcgacattatgggcgaaaacggcaaatggctggaagtcggcggctgcggcatggtgcatcccaacgtgttgaaaaatgtgaatatcgattctgaaaaatacaccggtttcgctttcggtatcggtctcgaccgtttcgcgatgctgcgttacaacgtgaacgatttgcgcttgttttttgataacgatttgaattttttgaagcagtttgtaaaatga

SEQ ID NO: 68569 - DNA, 1614 bp, Neisseria meningitidis
atgtttcttatcctagggcgaaattttttaaagattatcctatgctttagtttttttgtacctaaatttgcattggcatcagtaaatgttccgggtaaatttgatagggttgaagtttatgatgatggcagatatttaggtattcgaggttcagatgacaaaagaagaagaatttggaaaggtgtatttgatagagaatcgggaagatatttaacttcagaagctcaagatttaaaagttaggcatgtatctactggagcatcaagtacgggtaaagttagttcggttgtatcttcatcagtttcccgcgccgccgtcttgtcaggagtcggcaaacttgcccgcttaggcgcgaaattaagcacaagggcagttccttatgtcggaacagcccttttagcccatgacgtatacgaaactttcaaagaagacatacaggcacaaggctaccaatacgaccccgaaaccgacaaatttgtaaaaggctacgaatatagtaattgcctttggtacgaagacaaaagacgtattaatagaacctatggctgctacggcgttgacagttcgattatgcgccttatgtccgatgacagcagattccccgaagtcaaagaattgatggaaagccaaatgtataggctggcacgtccgttttggaattggcataaagaagaactgaataaattaagttctttggattggaataattttgttttaaatcgttgcacatttaattggaatggcggagattgtttggtcaataaaggtgatgatttcagaaatggggctgatttttcccttattcgcaattcaaaatacaaagaagaaatggatgccaaaaagctggaagagattttatcgttgaaagtcgatgccaatcccgacaaatacataaaggcaaccggttatcccggttattccgaaaaagtagaagtcgcacccggaacaaaagtgaatatgggtcccgtcacggacaggaacgggaatcccgttcaggttgtcgcaacattcggcagggattcgcaaggcaacaccacggtggatgttcaagtaatcccgcgtcccgacttgacccccggaagcgcggaagcaccgaacgcacagccgctgcccgaagtatcgcccgccgaaaaccccgcaaacaacccgaaccccaatgagaaccccggcacgagccccaatcccgaacccgaccccgatttgaatcccgatgcaaatcccgatacggacggacagcccggcacaagacccgattcccccgccgttccggaccgcccaaacggcagggacggcgaagacggcggccttttgtgcaaattcttccccgacattctcgcttgcgacaggctgcccgagcccaatccggcagaagatttaaatctgccgtctgaaaccgtcaatgtagagtttcagaaatcaggaatctttcaaaattccgcacagtgtcccgcacctgtcactttcacagtgactgtgcttgattccagcaggcagttcgcgttcagctttgagaacgcatgtaccatagccgaacggctaaggtacatgcttctcgcccttgcttgggcggttgccgcatttttctgtatccgcacagtatcccgtgaagtctag

SEQ ID NO: 68570 - DNA, 4176 bp, Neisseria meningitidis
atgaatttgttgaacttatttaatccgttgcaaactgccggcatggaagaagagtttgatgccattaaaatcggtattgcctctcccgaaaccatccgctcatggtcttatggcgaagtcaaaaaacctgaaaccatcaactaccgtacgttcaaacctgagcgtgacggtttgttctgtgccaaaatctttggcccggtcaaagactacgaatgcttgtgcggaaaatacaaacgcttgaaatttaaaggcgtaacgtgtgaaaaatgcggcgtggaagtaaccctgtccaaagtgcgccgcgaacgcatgggtcatatcgaattggctgcgcccgtcgcacatatttggttcttaaaatccctgccttcccgcttgggtatggtgttagacatgactttgcgcgacatcgagcgcgtattgtactttgaagcatttgtggtaaccgatcccggtatgactccgctgcaacgccgccaattgctgactgaagacgattactacaacaagctggacgaatacggcgacgatttcgatgccaaaatgggtgcggaaggtatccgcgaattgctgcgtaccctgaatgtagcgggcgaaatcgaaatcctgcgccaagagttggaatcgaccggttccgacaccaaaatcaaaaaaatcgccaaacgcttgaaagtattggaagccttccatcgttccggtatgaaactggaatggatgattatggatgtgctgccggtattgccgcctgatttgcgtccgttggttccattggatggtggtcgttttgccacttccgatttgaacgatttgtaccgccgcgttattaaccgtaacaaccgtctgaaacgtctgttggaactgcatgcgcccgacatcatcgtccgcaacgaaaaacgtatgttgcaagaagcagttgactcgctgttggataacggccgtcgcggtaaagccatgaccggcgccaacaaacgcccgctgaaatcattggcagacatgattaaaggtaaaggcggtcgcttccgtcaaaacctgttgggcaaacgtgtggactactccggccgttccgtgattaccgtaggcccatacctgcgtctgcaccaatgcggtctgccgaaaaaaatggctttggaactgttcaaaccgttcattttccacaaattggaaaaacaaggtctggcttccaccgttaaagcagcgaaaaaattggtagagcaagaagtaccggaagtatgggacatcttggaagaagtcatccgcgaacatccgattatgctgaaccgtgcgccgaccctgcaccgtttgggtattcaagcgtttgaacctatcttgattgaaggtaaagcgattcagttgcacccattggtgtgtgccgcgttcaacgccgactttgacggcgaccaaatggcggtacacgttccattgagcttggaagcacaaatggaagcacgcacgctgatgctggcttcaaacaacgtattgtctcctgccaacggcgaaccgattattgtaccttcccaagatatcgtattgggtctgtactacatgacccgcgaccgtatcaatgccaaaggcgaaggcagcctgtttgccgatgtgaaagaagtgcatcgcgcataccataccaaacaggtcgagctgggtacaaaaatcaccgtacgtctgcgcgaatgggtgaaaaacgaagcaggtgagtttgagcctgtcgttaaccgttacgaaacaaccgtcggccgtgcattgttgagcgaaatcctgccgaaaggcctgccgtttgaatatgtcaacaaagcgttgaagaaaaaagaaatttctaaactgattaacgcatcgttccgcctgtgcggcttgcgcgatacggttatctttgctgaccacctgatgtacaccggtttcggatttgcggcaaaaggcggtatttccattgccgttgacgatatggaaattccaaaagaaaaagcggccttgctggctgaagccaatgccgaggttaaagaaatcgaagaccaataccgtcaaggtttggttaccaacggcgaacgctacaacaaggtggtcgatatttggggtcgtgccggcgataaaatcgctaaggcgatgatggacaacctgtccaaacaaaaagttatcgaccgtgccggcaacgaagtcgatcaagagtcattcaactccatctatatgatggcagactccggtgcccgtggttctgcggctcagattaaacagttgtcaggtatgcgcggtttgatggcgaaacctgacggctcgattattgaaacgccgattacctcaaacttccgcgaaggtctgaccgtattgcaatactttattgcgacccacggtgcgcgtaagggtttggcggataccgcattgaaaaccgcgaactccggttacctgacccgtcgtctggtagacgtaactcaagatttggtcgttgttgaagacgattgcggtacttcagacggctttgttatgaaggcagtggtacaaggcggtgatgtgattgaagcattgcgcgatcgtattttgggccgtgttactgcgtctgacgttgtcgatccgtcaagcggcgagaccttggttgaagccggtacgttgttgactgaaaaactggtggatatgattgaccaatccggtgtcgatgaagtcaaagtccgtacgccgattacttgtaaaacccgccacggtttgtgcgcgcactgttatggtcgcgacttggcacgtggtaagctggtcaatgccggtgaggcagttggtgtgattgccgcccaatcaatcggcgaaccgggtacccagctgactatgcgtacgttccacatcggtggtgcggcatcccgtgcggcagcagccagccaagtggaagccaaatccaacggtacggcacgattcagcagccaaatgcgttatgttgccaacaataaaggcgagttggttgtcatcggccgttcttgtgaagtcgtgattcacgacgatatcggccgtgaacgcgaacgccacaaagtaccttacggtgccatcctgctggtacaagacggtatggccattaaagccggtcaaaccttggcaacctgggatccgcatacccgtccgatgatcaccgaacatgcaggtatggtgaaatttgagaacgtggaagagggtgttaccgttgcgaaacaaactgacgatgtaaccggtttgtccactttggtggtgattgacggtaaacgccgttccagcagcgcgtccaaactgctgcgtccgactgtaaaattgttggatgaaaacggcgtggaaatctgtattcccggtacgtccactccggtttcgatggcattccccgttggtgcggtgattaccgtacgcgaaggtcaggaaatcggtaaaggcgacgtattggcgcgtatcccgcaagcctcttccaaaacccgcgacattaccggtggtctgccgcgcgttgccgaattgtttgaagcacgcgtgccgaaagatgccggtatgttggcggaaattaccggtaccgtttccttcggcaaagagaccaaaggcaagcaacgtctgattgttactgacgtggacggtgtagcatacgagaccttgatttccaaagagaaacaaattctggtacacgacggtcaagtggtaaaccgcggtgaaaccatcgtggacggagctgttgatccgcatgatattctgcgtttgcaaggtatcgaagcactggcacgctacattgtccaagaggtgcaagaggtttaccgtctgcaaggtgtgaagatttctgataaacacatcgaagtcatcatccgtcaaatgttgcgccgtgtgaacattgcggatgccggcgaaaccgggttcattaccggagagcaggtcgaacgcggcgatgtgatggcggccaatgaaaaagctttggaagaaggcaaagagccggcacgttacgaaaacgtattgctgggtattaccaaagcctccctgtccaccgacagtttcatttctgccgcatcgttccaagaaacgacccgtgttctgaccgaagccgcgattatgggcaaacaagacgaactgcgcggtttaaaagagaacgtcatcgtcggccgcctgattcctgccggtaccggtttgacttaccaccgcagccgtcatcaacaatggcaagaggtggaacaggagactgctgaaacccaagtaacggatgaataa

SEQ ID NO: 68571 - DNA, 750 bp, Neisseria meningitidis
atgcttatccaggcagttaccattttccccgaaatgttcgacagcattacccgctacggcgtaacgggacgcgcgaacagacagggaatctggcagtttgaagcagtcaatccccgaaagtttgccgacaacagattgagctacatcgacgaccgcccgttcggcggcggcccgggaatgattatgatggctccgccgcttcatgcagcaatagaacacgccaaagcacaatcttcccaaaccgcaaaagtcatctacctcagcccccaaggaaaaccgctgacacaccaaaaagcggcagaactggcagaacttccgcatctgattctgctgtgcggacgctatgagggaatagacgaaagactgctgcaaaccagcgtcgatgaagaaatcagcatcggagacttcgttgtttccggcggagagcttcccgccatgatgctgatggatgcagtattgaggctcgtacccggcgtattgggcgatatgcagtctgccgaacaggattcgttctcaagcggcattttggactgcccccactacaccaaacccttagaatttcaaggtatggctgttccggaagtattgcgttccggcaatcatggcttgatagcggaatggcggttggaacaatcgctgcgccgcaccctggagcgcagacccgacttattggaaaagcgcagtttaatcccaaaggaatcccgcctcttggaaaccatccggcaagagcaacgggaaatccaatcataa

SEQ ID NO: 68572 - DNA, 540 bp, Neisseria meningitidis; identical to SEQ ID NO: 47703

SEQ ID NO: 68573 - DNA, 717 bp, Neisseria meningitidis; identical to SEQ ID NO: 39172

SEQ ID NO: 68574 - DNA, 639 bp, Neisseria meningitidis; identical to SEQ ID NO: 45470

SEQ ID NO: 68575 - DNA, 1194 bp, Neisseria meningitidis; identical to SEQ ID NO: 55300

SEQ ID NO: 68576 - DNA, 873 bp, Neisseria meningitidis; identical to SEQ ID NO: 54212

SEQ ID NO: 68577 - DNA, 777 bp, Neisseria meningitidis; identical to SEQ ID NO: 39426

SEQ ID NO: 68578 - DNA, 1110 bp, Neisseria meningitidis; identical to SEQ ID NO: 54329

SEQ ID NO: 68579 - DNA, 1104 bp, Neisseria meningitidis; identical to SEQ ID NO: 44519

SEQ ID NO: 68580 - DNA, 966 bp, Neisseria meningitidis; identical to SEQ ID NO: 60522

SEQ ID NO: 68581 - DNA, 693 bp, Neisseria meningitidis; identical to SEQ ID NO: 54890

SEQ ID NO: 68582 - DNA, 594 bp, Neisseria meningitidis; identical to SEQ ID NO: 55723

SEQ ID NO: 68583 - DNA, 1194 bp, Neisseria meningitidis; identical to SEQ ID NO: 41712

SEQ ID NO: 68584 - DNA, 117 bp, Neisseria meningitidis
gtgtgtttgaacctgttgaaagccgccaacaggctaagtgcgcccgcgccgcctaaaaggcagcccggatgcctgattatcgggtatccgggaaggattaaggggatatttgggtaa

SEQ ID NO: 68585 - DNA, 552 bp, Neisseria meningitidis; identical to SEQ ID NO: 60496

SEQ ID NO: 68586 - DNA, 1269 bp, Neisseria meningitidis
gtgaaaccgctgcgcagactgacaaacctccttgccgcctgcgccgtagcggccgccgccttcggacagcccgccctcgcggcggacttggcgcaagacccgttcattaccgataacgcccaacggcagcactacgaacccggaggcaaataccacctcttcggcgacccgcgcggcagcgtttccgaccgcaccggtcaaatcaacgtcatccaagactatacccaccagatgggcaacctgctcatccaacaggcaaacatcaacggcacaatcggctaccacacccgcttttccggacacggacacgaagaacacgcccccttcgacaaccacgccgccgacagcgcaagcgaagaaaaaggcagcgtcaacgaaggctttaccgtataccgcctcaactggaaagggcacgaacatcatcccgccgacggctatgacggcccgcagggcggcaattaccccaaacctacgggcgcacgagacgaatacacctatcacgtcaacggcacagcccgcagtatcaaactcaatccgaccgacacccgcagcatccggcaacgcatatccgacaattacagcaacctcggcagcaatttctccgaccgcgccgatgaagccaacagaaaaatgttcgagcacaatgccaagctcgaccgctggggcaacagcatggagtttatcaacggcgtcgccgccggcgcgctcaacccctttatcagcgcgggcgaagccgttgaccagtggatgcaggaaaaccccaatgccgccgaaaccgtcgaagccctggtcaacgtcctgccgtttgccaaagtcaaaaacctgacaaaggcggcaaaaccggggaaggctgcggttagtggggatttctcagactcctacaagcataacactgcttcaagattatctcagtctgtagatggagaaatgtttcaaacccgcaatgttgattttaaagcaaaatctattgggactaaaattcatgatggagctcaagggaaacatatttcaggacatagaaactacattgaaggtaagagtactttaaatcaaaacattaatcctcaagaattgttgaacggaatacattcaggtgcttatccagttatttctaaaggagcaagaggaaatcctgttgttgattttgggtatcctataggcagcgatgggaaatcaggattaagtaccaattttggtacgattcattcaggtaaaaatggagttcacattgttccggctaaccctaaaaccattaaaaaggtgcaatag

SEQ ID NO: 68587 - DNA, 471 bp, Neisseria meningitidis; identical to SEQ ID NO: 42963

SEQ ID NO: 68588 - DNA, 903 bp, Neisseria meningitidis; identical to SEQ ID NO: 55357

SEQ ID NO: 68589 - DNA, 159 bp, Neisseria meningitidis; identical to SEQ ID NO: 50295

SEQ ID NO: 68590 - DNA, 276 bp, Neisseria meningitidis; identical to SEQ ID NO: 53164

SEQ ID NO: 68591 - DNA, 582 bp, Neisseria meningitidis; identical to SEQ ID NO: 60695

SEQ ID NO: 68592 - DNA, 234 bp, Neisseria meningitidis; identical to SEQ ID NO: 45569

SEQ ID NO: 68593 - DNA, 489 bp, Neisseria meningitidis; identical to SEQ ID NO: 55919

SEQ ID NO: 68594 - DNA, 270 bp, Neisseria meningitidis; identical to SEQ ID NO: 56104

SEQ ID NO: 68595 - DNA, 324 bp, Neisseria meningitidis; identical to SEQ ID NO: 41034

SEQ ID NO: 68596 - DNA, 1554 bp, Neisseria meningitidis; identical to SEQ ID NO: 39330

SEQ ID NO: 68597 - DNA, 1176 bp, Neisseria meningitidis; identical to SEQ ID NO: 61066

SEQ ID NO: 68598 - DNA, 1674 bp, Neisseria meningitidis; identical to SEQ ID NO: 61677

SEQ ID NO: 68599 - DNA, 474 bp, Neisseria meningitidis; identical to SEQ ID NO: 54433

SEQ ID NO: 68600 - DNA, 2019 bp, Neisseria meningitidis; identical to SEQ ID NO: 54538

SEQ ID NO: 68601 - DNA, 441 bp, Neisseria meningitidis; identical to SEQ ID NO: 54348

SEQ ID NO: 68602 - DNA, 837 bp, Neisseria meningitidis; identical to SEQ ID NO: 60792

SEQ ID NO: 68603 - DNA, 1419 bp, Neisseria meningitidis; identical to SEQ ID NO: 60950

SEQ ID NO: 68604 - DNA, 921 bp, Neisseria meningitidis; identical to SEQ ID NO: 61281

SEQ ID NO: 68605 - DNA, 861 bp, Neisseria meningitidis; identical to SEQ ID NO: 60785

SEQ ID NO: 68606 - DNA, 1263 bp, Neisseria meningitidis; identical to SEQ ID NO: 61450

SEQ ID NO: 68607 - DNA, 2604 bp, Neisseria meningitidis; identical to SEQ ID NO: 61638

SEQ ID NO: 68608 - DNA, 168 bp, Neisseria meningitidis; identical to SEQ ID NO: 37435

SEQ ID NO: 68609 - DNA, 1914 bp, Neisseria meningitidis; identical to SEQ ID NO: 60903

SEQ ID NO: 68610 - DNA, 420 bp, Neisseria meningitidis
atgaatctcgtgaaactgctggcgaataactggcagccgattgccatcatcgcgcttgtcggcacgggtttggcggtgtcacaccatcaaggctacaaggcagcctttgcgaagcagcaggcggtcatcgacaagatggagcacgataaggcgcaagccctgctgttgtcggctcaaaactatgcgcgcgaactggaactggcacgcgcggaagcgaaaaaatatgaagtcaaggcgcacgctgtcggcatggctttggcgaaaaaacaggcggaagtcagccgtctgaaaacggaaaataaaaaggaaatcgaaaatgtccttactcaagaccgtaaaaatgcaggcggcggttgtattgacggctttggccatcacggcttgcagctctacaagcgcgccctcggctacggaaattaa

SEQ ID NO: 68611 - DNA, 402 bp, Neisseria meningitidis
atgaaagacaagcacgattcttccgccatgcggctggacaaatggctttgggcggcacgttttttcaagacccgttcccttgcgcaaaagcacatcgaactgggtagggttcaagtaaacggctcgaaggtcaaaaacagtaaaaccatagacatcggcgatattatcgacctgacgctcaattcccttccctataaaatcaaggttaaaggtttgaaccaccaacgccgcccggcatccgaggcgcggcttctgtatgaagaagacgcaaaaacggcagcattgagggaagagcgcaaacagctcgaccaattcagccgcatcacttccgcctatcccgacggcagaccgaccaagcgcgaccgccgccaactggacaggctgaaaaaaggagactggtaa

SEQ ID NO: 68612 - DNA, 1260 bp, Neisseria meningitidis; identical to SEQ ID NO: 55931

SEQ ID NO: 68613 - DNA, 357 bp, Neisseria meningitidis; identical to SEQ ID NO: 43712

SEQ ID NO: 68614 - DNA, 1128 bp, Neisseria meningitidis; identical to SEQ ID NO: 36955

SEQ ID NO: 68615 - DNA, 1083 bp, Neisseria meningitidis; identical to SEQ ID NO: 54567

SEQ ID NO: 68616 - DNA, 456 bp, Neisseria meningitidis; identical to SEQ ID NO: 60338

SEQ ID NO: 68617 - DNA, 2751 bp, Neisseria meningitidis
atgcaacagcaatatttgttccgattaaatattttatgcctgtcgctgatgaccgcgctgcccgtttatgcagaaaatgtgcaagccggacaagcacaggaaaaacagttggataccatacaggtaaaagccaaaaaacagaaaacccgccgcgataacgaagtaaccggtttgggcaaattggtcaaaaccgccgacaccctcagcaaggaacaggtactcgatatccgcgacctgacgcgttacgaccccggcatcgccgtcgtcgaacaggggcgcggcgcaagctcgggttactcgatacgcggtatggacaaaaaccgcgtttccttgacggtggacggcttggcgcaaatacagtcctacaccgcgcaggcggcattgggcgggacgaggacggcgggcagcagcggcgcaatcaatgaaatcgagtatgaaaacgtcaaagctgtcgaaatcagcaaaggctcaaactcggtcgaacaaggcagcggcgcattggcgggttcggtcgcatttcaaaccaaaaccgccgacgatgttatcggggaaggcaggcagtgggggattcagagtaaaaccgcctattccggcaaaaaccgggggcttacccaatccatcgcgctggcggggcgcatcggcggtgcggaggctttgctgatccacacgggtcggcgcgcgggggaaatccgcgcccacgaagatgccggacgcggcgttcagagctttaacaggctggtgccggttgaagacgacagcaaatacgccgatttcatcgttgaagaagaatgcgaaagcaaaaattacgaaacgtgtaaagcgaatccgaaaaaagatgttgtcggcaaagacgaacgtcaaacggtttccacccgagactacacgggacccaaccgcttccttgccgatccgctttcatacgaaagccgatcgtggctgttccgcccgggttttcgttttgaaaacaaacggcactacatcggcggcatactcgaacacacgcaacaaactttcgacacgcgcgatatgacggttccggcattcctgaccaaggcggtttttgatgaaaatagaaaatacggaccgataagaggcaacggcaaatacgcgggcaaccacaaatacggcggactgtttaccaacggcgaaaatggtgcgctggtgggcgcggaatacggtacgggcgtgttttacgacgagacgcacaccaaaagccgctacggtttggaatatgtctataccaatgccgataaagacacttgggcggattatgcccgcctctcttacgaccggcagggcatcggtttggacaatcattttcagcagacgcactgttctgccgacggttcggacaaatattgccgtccgagtgccgacaagccgttttcctactacaaatccgaccgcgtgatttatggggaaagccacaggctcttgcaggcggcattcaaaaaatccttcgataccgccaaaatccgccacaacctgagcgtgaatctcgggtttgaccgctttggctctaatctccgccatcaggattattattatcaacatgccaaccgcgcctattcgtcgaaaacgccccctaaaaccggcaacggcggctcaaacgccagccccaacggcagccaagacaacccctattgggtcagcataggcgggggaaatgtggttacggggcaaatctgccgcttgggcaacaatacttatacggactgtacgccgcgcagcatcaacggcaaaagctattacgcggcagttcgggacaatgtccgtttgggcaggtgggcggatgtcggcgcggggttgcgctacgactaccgcagcacgcattcggacgacggcagcgtttccaccggcacgcaccgtaccctgtcctggaacgccggcatcgtcctcaaacctgccgactggctggatttgacttaccgcacttcaaccggcttccgcctgccctcgtttgcggaaatgtacggctggcgggcgggtgttcaaagcaaggcggtcaaaatcgatccggaaaaatcgttcaacaaagaagccggcatcgtatttaaaggcgatttcggcaacttggaggcaagttggttcaacaatgcctaccgcgatttgattgtccggggttatgaagcgcaaattcaaaacggcaaagaaacagccaaaggcgacccggcttacctcaatgcccaaagcgcgcggattaccggcatcaatgttttgggcaaaatcgattggaacggcgtatgggataaattgcccgaaggttggtattctacatttgcctataatcgtgtccgtgtccgcgacatcaaaaaacgcgcagaccgcaccgatattcaatcacatctgtttgatgccatccaaccttcgcgctatgtcgtcggcttgggctatgaccaaccggaaggcaaatggggtgtgaacggtatgctgacttattccaaagccaaggaaatcacagagttgttgggcagccgggctttgctcaacggcaacagccgcaatacaaaagccaccgcgcgccgtacccgcccttggtatattgtggatgtgtccggttattacacgattaaaaaacacttcaccctccgtgcgggcgtgtacaacctcctcaaccaccgctatgttacttgggaaaatgtgcggcaaactgccggcggcgcagtcaatcaacacaaaaatgtcggcgtttacaaccgatatgccgcccccggccgaaactacacatttagcttggaaatgaagttctaa

SEQ ID NO: 68618 - DNA, 2004 bp, Neisseria meningitidis
atgctgccaacccaacccaacccaacccaacccaacccaacccaacccaacccaacccaacccaacccaacccaacccaacccaacccaacccaacccaacccaacccaacccaagccctgatctaatcgacacagccggggtgaacaccgaggcaatctacacttcagacggcattaccgccaactctacccaactcgaacagctcaaaaaactgtttcccgcctgttttgacgcagacggaaatttccttatcgacagattacaagccgaaattgcgccacagaccgacatcggacgcgaattttacgaaatgaactggctgggcaaatcatatgctcgcctgcttcgcaacctgccgcccgaaaccctgataagtgaagacaagacgcacaacgccaaacccgaaaatgcaggcagccaaaacctactgattcgtggcgacaatctagaagtgttgaaacacttaaaaaacgcctacacaaacagcgtgaagatgatttacatcgacccgccctacaacaccggatcagacggctttgtctatcaggacgaccgcaaattcacaccagccgaacttgcctgcttagccaatattgacgaagacgaagccgcgcggattttagatttcaccgacaaaggctcaaactcgcacagtgcatggttgacctttatgtatccgcgcctgtatatcgcccgcgaactgttaaaggacgacggcgtgatttttatctcgattgacgataacgaagcggcgcagttgaagttgttgtgtgatgaagtgtttggggaagggaattttattaaagatttaattgttaatacatcagaaggtggtggtaatgcaaaatatgttgtaaatgggcatgaaactgttttagtttatgcgaaagatattactcattttgacaatctaaaaagaccaaaagatatacgcggcaaaaaaattgtaatcaatgatgaattatattggatacaggaagatgccgttcgcgaacagtttggcaaatatgggaacttgcattacgaagatattattgaaataaaaggaattgagtttaaaaacaaaattgataaagatattgaaaataatgaatatatcttaattccgaagtcttatgggaaaacaattattggaaaacttagaaaagtatccgatgatttttccaaatttcatagcatcttaaatattggaaatataagtaaaaatcttactaaagatggtattcgtgaattagaagagttgtttgaaactggaaaaggttattctccttttgaaacaccaaaaccattagatttattgaaaagattagttctttctgcaactttcaagggaaatcaaactgacctaatcctagacttcttcgcaggcagcggcacaaccgcccacgccgtgatgcagcttaacgccgaaggacaaaacggtaaccgccgctatatctgtgtacagcttcccgaaaaaaccgctgaaaaatccgaagcccgtaaagcaggctacccgaccatcttcgacatcaccaaagcccgcatagaaaaagccgccgccaaaatccgcgtcgaacatcccgattacacgggcgattcgggcttcaaaatctttcaaacggcagacaatttcaggcagcatccggacaaggatttttcgcccgaacaaccggatttgccgcttaacgatgaattaagcgaagaacagctgcaaacgcttctgaccacctggacgctgtatgacggggcggcactgaccacgccggttgagcctgtgcggttaggggcttacacggcgtatctgtgcgaaaaacggctgtatctgatgaatgccggttttacttccgccgatttgttggcgtttatccgcaagctggacgacgatgcggatttcaatcccaaccgcgtgattgtattcggcagcaatatggcaagcgccatgcagcacgaacttgaccaggcggttcgcggttatgccaataaaaaagaaattgagttaaacgtgattatcagggtttga

SEQ ID NO: 68619 - DNA, 603 bp, Neisseria meningitidis; identical to SEQ ID NO: 54300

SEQ ID NO: 68620 - DNA, 1134 bp, Neisseria meningitidis; identical to SEQ ID NO: 61289

SEQ ID NO: 68621 - DNA, 501 bp, Neisseria meningitidis
atgaacacccttcaaaaaggttttacccttatcgagctgatgattgtgattgccatcgtcggcattttggcggcagtcgcccttcctgcttatcaagactacacagcccgcgcacaagtttccgaagccatccttttggctgaaggtcaaaaatcagccgtcaccgagtattacctgaatcacggcgaatggcccgccaacaacaattctgccggcgtggcatcctccaccgacatcaaaggcaaatatgttgcaggggttaaagttgaaaaaggcgtcattaccgccacaatggcttcaagcaacgtaaacaaagaaatcaaaggcaaaaaactctccctgtgggccacgcgtcaaaacggttcggtaaaatggttctgcggacagccggttgagcgcaacgccaacaacgccgacgccgtcgccaacggcaagggcaccgccaacatcgacaccaagcacctgccgtcaacctgccgcgacacagcatctgccagctaa

SEQ ID NO: 68622 - DNA, 1179 bp, Neisseria meningitidis; identical to SEQ ID NO: 61946

SEQ ID NO: 68623 - DNA, 354 bp, Neisseria meningitidis; identical to SEQ ID NO: 54883

SEQ ID NO: 68624 - DNA, 402 bp, Neisseria meningitidis; identical to SEQ ID NO: 51684

SEQ ID NO: 68625 - DNA, 1800 bp, Neisseria meningitidis; identical to SEQ ID NO: 51453

SEQ ID NO: 68626 - DNA, 273 bp, Neisseria meningitidis; identical to SEQ ID NO: 59575

SEQ ID NO: 68627 - DNA, 2226 bp, Neisseria meningitidis
atgactcaaaaatccaccattatttatacccataccgacgaagcccccgcgctggcgacccaatcgctgctgccgattgtgcaggcttttgcccgccacgccgatattgatgtcaaaactgccgacatttccctgtccggccgtattttggcggcatttcccgaatatctgaccgaagcgcagcgcgtacctgatgcgcttgccgaattgggcgaactggtgaaacaacccgatgcaaacgtaatcaaactgccgaacatcagcgcatccgtaccgcaactgactgccgcgattaaagaattgcagtctaaaggctttgccgttcccgactatcctgccgaccctcaaaccgatgaagaaaaagccgtacgcgaacgctacgaccgcatcaaaggcagcgcggtaaaccctgtcctgcgtgaaggcaactccgaccgccgcgcccccaaagcagtgaaaaactttgccaaaaaaaatccgcacagtatgggcgcgtgggcgaaagactccaaaacccacgttgccaccatgcaaagcggcgactttttccataacgaacaatccgttaccgtgcccgaagcgacttccgtatccatcgtgttcaccgacaaacaaggcaacaaaaaagagctgcgcgcgcctgttgccctgaaagccggcgaaatcatcgacgcaaccgtgatgagcaaaaaagccctgctcgccttccttgccgaacaagtgaaagacgcgaaggcaaaaggcgtattgttctcactgcatatgaaagccacgatgatgaaagtgtccgacccgattatcttcggacacgccgtcaaagtgttcttcgcgcctgtatttgaaaaattcggcggcaaactggctgccgcaggtgtcaacgtcaacaacggtttcggcaacctgcttgccaatctggacaaactggatgcggacacccgcgccgccgtcgaagctgaaatcgccgccgtttacgccgccaaccctgatttggcgatggttgattccgacaaaggcatcaccaacctgcacgttcccagcgatgtcatcgtcgacgcttctatgcctgcgatgattcgtaattccggccgtatgtgggacaaaaacggcaaagcacaagacaccaaagccgtgattcccgacagcagctatgccggcgtttaccaagcaaccatcgacttctgccgcgaacacggcgcatttgacccgacaaccatgggtactgtgcccaacgtcggactgatggcgcaagcggcggaagaatacggctcgcacaacaaaacctttgaaatcgaagccgacggtcaggttcaagtagttgatgcggcaggaaaagtcctgatgcagcacgacgttgaagcaggcgacatctggcgtatgtgccaaaccaaagacgctccggttaaagactgggtacaactcgccgtcaaccgcgcccgcctgagcaatacgcccgccgtgttctggctcgacgaaaaccgtccgcatgacaagagcctgctcgccaaggttaaagcctaccttgccgaactggataccaacggcctcgacatccgcgtcctcgctcccgaagaagccgccaagttcagcctgggccgtctgaaaaacggcgaagacaccatctccgtaaccggtaatgtcttgcgcgactacctgaccgacttgttcccgattttggaactcggcacaagcgcgaaaatgctgtctatcgttccattgatgaacggcggcggtatgtttgaaaccggcgcgggcggttctgcaccgaaacacgtccaacaattccttgaagaaaaccacttgcgttgggactctttgggcgaattcctcgcgctcgccgtatcgtttgaacatttggcacaaaaaaccggcaacaccaaagcccaagtcctcgccgacactttggatgccgccaccgaaaaactgctgctaaacgacaaatcgcccaaacgcaaaaccggcgaactcgacaaccgcggcagccatttctacctcaccctctactgggcgcaagaattggcggcgcaagacaaagatgccgaattgaaagccgcatttgcgccgttagccaaatcgttggcggaaaacgaagccaaaatcgttgaagaactctctgccgtacaaggcaaagcggtcgacatcggcggctactacgccgccaatcctgaaaaagcggcacaagcgatgcgcccaagcgcaacctttaatcaggcactaagcaccttataa

SEQ ID NO: 68628 - DNA, 459 bp, Neisseria meningitidis; identical to SEQ ID NO: 60481

SEQ ID NO: 68629 - DNA, 795 bp, Neisseria meningitidis
atgatgtccgaacaccgagtcaaccacgaacctgtcttcctgttggcttcctcgccatggcgcgaaagcagcctgcgggtcgaagcgttcagccgccgttacgggcgtgtggcacttttggcaagaagcgcgcgcaagcggcagagcgaattgcgcggcgtgctggtttccttcgtgcccgtcagtgcgtcgtggtacggcagtcaggaactcaaaaccctgcaccgtgccgaatgggtcggcggatggcggcagccgcagggcagggcgttgttcagcggtctgtatgtgaacgaactggtgttgaaactgaccgcgcgcgaagacccgatgcccgaactgtacgacgcgttggcaaaagtgatggaggcggtgtgtcgtgaagccaaccacattgccgatttgcgccgcttcgagtggaagctgctcaatgccttgggcgttgcccccgatttgcacgccgacggcacgggcggcgatattttggcggataaaacctaccggctgatgcccgaagaggcggtcatgcccgtatgccgggacacggacgcgctttcgcacgaggccggcgcaattgtcgaagggcaaagcctgatcgatttgcgcgaaggcagtttccgcaccgccgaaagcctgcaacaggcattgaaaatcacacggctttttatccgccacctgttgcccgaggggctgaaatcgcggcaggtgttggaacagatacggcagtttgaccgcaaagaaaccgcccgggaaaccgtcccgacttcggacggcacggcttcaaatgccgtctga

SEQ ID NO: 68630 - DNA, 2277 bp, Neisseria meningitidis
atggcacaaattacactcaaacccattgttttatcaattcttttaatcagcacacccctcctcgtcctagcgcatgaaaccgagcagtcggtggacttggaaacggtcagcgtcgtcggcaaaagccgtccgcgtgccacttcggggctgctgcacgcttcgacctcctccgacaaaatcatctccggcgataccttgcgccaaaaagccgtcaacttgggcgatgctttggacggcgtaccgggcattcatgcctcgcaatacggcggcggcgcgtctgctcctgtcattcgcggtcaaacgggcaggcggattaaagtgttgaaccatcacggcgaaacaggcgatatggcggatttttcgcccgatcacgccattatggtagataccgccttgtcgcaacaggtcgaaatcctgcgcgggccggttacgctcttgtacagctcgggcaatgtggccggtttggtcgatgttaccgatggaaaaatccccgaaaaaatgcctgaaaacggcgtatcgggcgaagccggattacgtttgagcagcggcaatttggaaaaactgacatccgcaggcatcaatatcggtttgggcaacaacttcgtgctacataccgaaggcttgtaccgcaaatcaggcgactacgccgtaccgcgttaccgcaatctgaaacggctgcccgacagccacgccgattcgcaaacaggcagcatcgggctgtcttgggttggcgaaaaaggctttatcggcgtggtgtacagcgaccgcagagaccaatacggcctgcctgcccacagccacgaatacgatgattgccacgccgacatcatttggcaaaagagtttgattaacaaacgctatttgcagctttatccgcacttgttgaccgaagaagacatcgattacgacaatccgggtttgagctgcggttctcacgacggtgacggtgcacacgcacacacccacagcggcagaccgtggatagacctgcgcaacaaacgctacgaactccgtgccgaatggaagcagccgctccccggttttgaagccctgcgcgtacacctgaaccgcaacgactaccaccacgacgaaaaagcaggcgatgcagtagaaaacttcttcaacaacaaaacacacaacgcccgtatcgagttgcgccaccaacccataggccgtctgaaaggcagctggggcgtgcaatatttgggacaaaaatccagcgcactttccgccattcccgaaaccgtccaacaaccgatgttgattgacaacaatgtgcgccattacagctttttcggtgtagaacaggcaaactgggacaacttcacgcttgaaggcggcgtacgcgtggaaaaacaaaaagcctccatccgatacgacaaagcattgattgatcgggaaaactactacaaccagcccctacccgatctcggcgcgcaccgccaaaccgcccgctcattcgcactttcgggcaactggtatttcacgccgcaccacaaactcagcctgaccgcctcccatcaggaacgcctaccgtcaacgcaagagctgtacgcacacggcaaacacgtcgccaccaacacttttgaagtcggcaacaaacacctcaacaaagagcgttccaacaacatcgaactcgcgctgggctacgaaggcgaccgctggcaatacaatctggcactctaccgcaaccatttcggcaactacatttacgcccaaaccttaaacgacggacgcggccccaaatccatcgaagacgacagcgaaatgaagctcgtacgctacaaccaatccggtgcggacttctacggcgcagaaggcgaaatctacttcaaaccgacaccgcgctaccgcatcggcgtttccggcgactatgtacgaggccgtctgaaaaacctgccttccctacccggcagggaagatgcctacggcaaccgtcctttcatcgcacaggacgaccaaaatgccccccgtgttccggctgcgcgcctcggcttccacctgaaagcctcgctgaccgaccgtatcgatgccaatttggactactaccgcgtgttcgcccaaaacaaactcgcccgctacgaaacgcgcacgcccggacaccatatgctcaacctcggcgcaaactaccgccgcaatacgcgctatggcgagtggaattggtacatcaaaaccgacaacctgctcaaccaatccgtttacgcccacagcagcttcctctctgatacgccgcaaatgggtcgcagctttaccggcggcgtgaacgtgaagttttaa

SEQ ID NO: 68631 - DNA, 1557 bp, Neisseria meningitidis; identical to SEQ ID NO: 60345

SEQ ID NO: 68632 - DNA, 1428 bp, Neisseria meningitidis; identical to SEQ ID NO: 54570

SEQ ID NO: 68633 - DNA, 411 bp, Neisseria meningitidis
atgcctgtctatttccgcaccccaagcaggaaacgcctgcacaaaatgaaccgccgccagcataaaaagctgcatttgggcgagtttcaaacattgattttcggcgttcaaggcagtttgcaccaagctgaggacgatgccgaagcgttcggccgctttatggacgagctgattgcgtatcttgtggtaaacggctttgaaatggcgggcgggggcgattgcggcgatttttcgtgcctgtttcaaaaatccggtgcccgaagcttgggagaaaccgagaaaaaagccattatctcttggctggcagaccgcgaagatgttgccactttgtacgccaccccgctggttgacggtttttatggggatgacggctgggaaaattacagcgaaacctataaacaggcagattaa

SEQ ID NO: 68634 - DNA, 1566 bp, Neisseria meningitidis; identical to SEQ ID NO: 61706

SEQ ID NO: 68635 - DNA, 1404 bp, Neisseria meningitidis; identical to SEQ ID NO: 39890

SEQ ID NO: 68636 - DNA, 498 bp, Neisseria meningitidis; identical to SEQ ID NO: 55418

SEQ ID NO: 68637 - DNA, 225 bp, Neisseria meningitidis; identical to SEQ ID NO: 38642

SEQ ID NO: 68638 - DNA, 1077 bp, Neisseria meningitidis; identical to SEQ ID NO: 61318

SEQ ID NO: 68639 - DNA, 576 bp, Neisseria meningitidis; identical to SEQ ID NO: 55536

SEQ ID NO: 68640 - DNA, 627 bp, Neisseria meningitidis; identical to SEQ ID NO: 60559

SEQ ID NO: 68641 - DNA, 441 bp, Neisseria meningitidis; identical to SEQ ID NO: 55334

SEQ ID NO: 68642 - DNA, 1146 bp, Neisseria meningitidis; identical to SEQ ID NO: 61275

SEQ ID NO: 68643 - DNA, 4179 bp, Neisseria meningitidis
atgaactattcgtttaccgagaaaaaacgtatccgtaagagttttgcaaagcgggaaaatgttttggaagttcctttcttgctagcaacccaaattgattcttatgcgaagtttttgcagctggaaaatgcttttgacaaacgtaccgatgacggtctgcaggcggcatttaattctattttcccgattgtgagccataacggttatgcgcgattggagtttgtgcattacacattgggcgagcctttgttcgatattcccgaatgtcagttgcgcggaatcacttatgcagcccccttgcgcgcgcgtatccgtttggtgattttggataaggaagcatctaaaccgacggtaaaagaagttcgtgaaaacgaagtgtatatgggcgaaattccgttgatgaccccgagcggttcttttgtgattaacggcacagagcgtgtgattgtctcccagttgcaccgttcgcccggcgtattcttcgagcatgacaaaggtaagacgcactcttccggcaagttgttattctccgcccgtatcattccctaccgcggttcatggttggattttgaatttgacccgaaagatttgctgtatttccgtatcgaccgccgccgtaaaatgccggtaacgattttgttgaaggctttgggctacggcaatgagcaaatcttggatattttctacgacaaagaaacgttctatttgtcttcaaacggtgttcaaaccgatttggtcgcaggccgtctgaaaggcgaaactgccaaggtcgatatcttggataaagaaggcaatgtattggttgccaaaggtaagcgcattactgcgaaaaatatccgtgatattaccaatgcaggcctgacccgtttggatgtagaaccggaaagcctgctgggtaaagcattggctgccgatctgattgattcggaaaccggcgaggtattggcttctgccaatgatgaaattacagaagagttgttggccaaatttgatatcaacggcgtaaaagaaattacgaccctttacatcaatgagttggatcagggtgcttatatctccaacaccttgcgtacggatgagactgccggccggcaggcggcgcgtgttgcgatttaccgtatgatgcgtccgggcgaaccgcccaccgaagaggcggtcgagcaattgtttaaccgcttgttcttcagtgaagacagctacgatttgtcccgcgtaggccgtatgaaatttaatacgcgcacatacgaacaaaaactgtccgaagcccaacaaaactcttggtacggccgcctgctgaacgaaacgtttgccggtgctgccgaaaaaggcggttatgtcctgagcgtcgaagatattgtcgcctcgattgcgactttggtcgagttgcgtaacggccatggtgaagttgacgatatcgatcacttgggcaaccgccgagtacgttcggtaggcgagctgactgaaaaccaattccgcagcggtttggcccgtgtggaacgtgctgtaaaagaacgtttgaatcaggcggaatcagaaaacttgatgccgcacgatttgattaatgcaaaacctgtttctgccgctattaaagaattcttcggctccagccaattgagtcagtttatggatcagaccaaccccttgtctgaagtaacccataaacgccgcgtatccgcattgggtccgggcggtttgacccgcgaacgtgccggcttcgaggtacgggacgtgcatccgacccactacggccgcgtatgtccgattgaaacgcctgaaggtccgaacatcggtttgatcaactcattgtccgtttatgcgcgcaccaatgattacggtttcttggaaacgccttaccgccgcgttatcgacggcaaagtaaccaaggaaatcgattacttgtctgccatcgaagaaggccgctatgtgattgcacaggcgaatgccgatttggattcagatggcaatctgattggcgatttggttacctgtcgtgaaaaaggcgaaaccattatggcaacgcccgaccgcgtccaatatatggacgtggcaactggtcaagtggtatccgttgcagcatccctgattccgttcttggaacacgatgacgcgaaccgcgcattgatgggtgcgaatatgcaacgtcaggcagtgccttgcttgcgtcctgaaaaaccgatggtcggtaccggtatcgagcgttccgttgccgttgactctgctactgcaatcgttgcccgccgaggcggcgtggtcgagtatgtcgatgccaaccgtgttgtgattcgtgtccatgacgacgaagcgactgccggcgaagtgggtgtcgatatttacaacttggttaaatttacccgttccaaccaatctaccaacatcaaccaacgtccggccgtaaaagcaggcgacgtgttgcaacgcggcgacttggtggccgacggtgcgtctaccgacttgggcgaattggctttgggtcaaaacatgaccatcgccttcatgccatggaacggttacaactatgaagactcgattctgatttcagaaaaagtggctgcggatgatcgttacacttcgattcacattgaggaattgaatgtcgttgcccgcgataccaagctgggtgcggaagacattacccgcgatattccgaacttgtccgagcgtatgcaaaaccgcttggacgaatccggtatcgtttacatcggtgcagaagtagaagccggcgatgtgttggtaggcaaagtaacgcctaaaggcgaaacccagctgacgccggaagaaaaactgttgcgcgccatcttcggcgaaaaagcgtctgacgtaaaagatacttcattgcgtatgcctaccggtatgagcggtacggttatcgacgttcaagtcttcactcgtgaaggtattcaacgcgacaaacgcgcccaatccattatcgattccgagttgaaacgctaccgtttggatttgaacgaccaattgcgtattttcgacaacgacgcattcgaccgtatcgaacgtatgattgtgggtcaaaaagccaatggtggtccgatgaagctggctaaaggcagcgaaattactaccgaatatttggcgggtctgccgagcaggcacgattggttcgatatccgtctgaccgatgaagatttggccaagcagttggaactgattaaagtgagcctgcaacaaaaacgcgaagaagcggacgagttatacgaaatcaagaagaaaaaactgacccaaggcgacgaattgcaacccggcgtacaaaaaatggtgaaagtttttatcgccatcaaacgccgtctgcaagccggcgacaaaatggcgggccgccacggtaacaaaggcgtggtatcgcgcattctgccagtggaagacatgccttacatggcggacggccgtccggtagacatcgtactgaacccattgggcgtaccttcccgtatgaacatcggtcagattttggaagttcacttgggttgggcagcaaaaggtatcggcgagcgtatcgaccgtatgctgaaagagcaacgcaaagcaggcgagttgcgcgagttcttgaacagactctacaacggcagcggtaagaaagaagatttggatgccctgactgatgaagaaatcatcgaactggcctccaacctgcgcaaaggtgcatctttcgcctctcctgtattcgacggtgcgaaagagtctgaaatccgcgaaatgctgaacttggcttatccgagcgacgatcctgaggttgaaaaactgggcttcaacgacagtaaaacccaaatcacgctgtatgacggccgttcaggcgaagcatttgaccgcaaggttacagtaggtgtgatgcactatctgaaactgcaccacttggttgacgaaaaaatgcacgcgcgttctaccggtccgtacagtctggttacccagcagcctttgggcggtaaagcccagttcggcggccaacgtttcggcgagatggaggtttgggcattggaagcatacggcgcggcatacacgctgcaagagatgctgactgtgaagtctgacgacgtgaacggccgtaccaaaatgtacgaaaacatcgtcaaaggcgaacacaaaatcgatgccggtatgcccgagtccttcaacgtattggtcaaagagattcgctcactgggcttggatatcgatttggaacgttactaa

SEQ ID NO: 68644 - DNA, 3216 bp, Neisseria meningitidis; identical to SEQ ID NO: 62005

SEQ ID NO: 68645 - DNA, 639 bp, Neisseria meningitidis; identical to SEQ ID NO: 60906

SEQ ID NO: 68646 - DNA, 1981 bp, Neisseria meningitidis
atgaccgagccgacctacatccccttgcgcctgcataccgagttctcaattaccgacggtatggtgcggattaaaaaactggttgccaaagcgcaggaatacggtttgcctgctttgggcatcagcgatttgatgaacgaattcggcttggtgaaattctataaagcctgccgcggcgcagggattaaacccatcggcgcggcggacgtgtggataggcaatccgaatgcgcccgacaagccgtttcgcgccatgctgattatccgcaacgatgcgggctatctgcgcttgagcgagcttctgacggcggcttatgtcggcaaagaccgcaatatccatcatgcggaactcaatcccgaatggctggaaaacggcgacaacagcggcttgatttgtttgagcggcgcacattacggcgaagtgggcgtgaatctgttgaacggcaatgaagacgcggcgcgtgcggcggcgttgaaatatgcggcatggtttcccgatgcgttttatttagagctgcaacgcctgcccgaacgccccgaatgggaggcttgcgtttccggcagcgtgaagctggcggaggaactgggtttgccggtggtggcgacccacccgacgcagtttatgagcagcgatgatttcaacgcgcacgaggcacgggtgtgtattgcgggcggctgggtgctgacggacaaaaaacgtccgcgcgatttcacaccgggccagtttttcattccgccggaaacgatgctggagcgtttcgccgatttgcccgaggccttggaaaacacggtagaaattgccaaacgctgcaatctgcacatcacattgggcaaaaacttcctgccccttttccccacgcccgacggtttatcgcgcgatgactatctcatcaaactctcaaacaagggcttgcaggaacgcatggttcagctttatcccgacgaggcggagcgtgcggcaaaaatgccggaatatcaggaacgtttggattttgagctgaacatcatcatccagatgaaattccccggctatttccttatcgtacaagactttatcaactgggcgaaaacgcacggctgtccggtcgggccgggacgcggttcgggcgcgggttcgctggtggcgtattcgctgaaaattaccgacctcgacccgctgaaatacgcgctgctgtttgaacgtttcttaaaccccgaacgcgtctccatgcccgacttcgacgttgacttctgtcaggcaaaccgcggccgcgtgatcgaatatgtgcgcgataaatacggcgctcaggcggtcagccagattgttaccttcggcacgatgtcgtccaaagcggtcatccgcgacgtggggcgcgtgttggagctgccgtttatgctgtgcgacaaactgtccaagctgattccgttggaagccaacaaacctctgggtttggacgacgcgatgaaggcggagccgcagattcaggaattaatcgaagcggaagaagcggacgaactgattacgctggcgaaaaagctggaagacctgacgcgcggtttgggtatgcacgcaggcggcgtgttgattgcgccgggcaagatttccgattacagccccgtgtatcaggcggatgaatccgcctctcccgtatccatgtacgacaagggcgacgtggaagacgtgggtttggtgaaattcgactttttaggtctgcgtaacctgaccattatcgaaatggcgcagaacaacatcaaaaacaccaccggcgacatcatcgatgtcggcaaaattccgctcgacgaccaagccgcctaccaaatcttccgagatgcgaacaccaccgccgtgttccagttcgagtcgaccggcatgaaaaaaatgctgaaaacggcgcacacgaccaagtttgaagaactgattgccttcgtatcgctctaccgccccggcccgatggacaacatccccgacttcgtcgcgcgcatgaaaggccaggaattccaat

SEQ ID NO: 68647 - DNA, 1839 bp, Neisseria meningitidis; identical to SEQ ID NO: 60759

SEQ ID NO: 68648 - DNA, 864 bp, Neisseria meningitidis; identical to SEQ ID NO: 54925

SEQ ID NO: 68649 - DNA, 522 bp, Neisseria meningitidis; identical to SEQ ID NO: 43029

SEQ ID NO: 68650 - DNA, 291 bp, Neisseria meningitidis; identical to SEQ ID NO: 55030

SEQ ID NO: 68651 - DNA, 327 bp, Neisseria meningitidis; identical to SEQ ID NO: 42598

SEQ ID NO: 68652 - DNA, 1140 bp, Neisseria meningitidis
atgaaaaaaacactggtggcggcggcgatcctgagcctcgccttgactgcgtgcggcggcggaagcgataccgccgcccaaaccccctccgccaagcccgaagccggacaatcgggcaaactcaatatctacaactggtcggattatgtcgatcccgaaaccgtcgccgcctttgaaaaagaaaccggcatcaagacgcgttccgattattacgacagcaacgaaacactggaggcaaaagtcctgaccggcaaatccggctacgacctgaccgcgccgtccatcgccaacgtcggccggcaaatcaaagcgggtgcgtatcagaaaatcgacaaggcgcaaatcccccattacggcaacatcgataaagatttgctgaaaatgatggaagccgtcgatccgggcaacgaatatgccgtgccttatttctggggaatcaatactttggcaatcaatacccagcaggtgaaaaaggcattgggtacggacaagctacccgaaaacgagtgggatttggtgttcaaacccgaatacaccgccaaactcaaatcctgcggcatcagctatttcgacagcgcaatcgaacagattcccttggcgttgcactatttgggcaaagaccccaacagtgaaaatcctgaagacatcaaagccgccgtcgatatgatgaaagccgtccggggcgacgtgaaacgcttcagctcttccggctatatcgacgatatggcggcgggcaacctgtgtgccgccattggttacggcggcgatttgaacattgccaaaacccgtgccgaagaagccgcaaacggcgtggaaatcaaagtattgaccccgaaaaccggcgtgggcgtgtgggtggattcctttatgattccgcgcgacgcgcaaaacgtcgccaacgcccaccgctatatcgactacacgctccggcccgaggtggcggcgaaaaacggcagcttcgttacctacgcgcccgccagccgtcccgcgcgcgagctgatggatgaaaaatacacctccgacgcatcgattttcccgaacaaagaactgatggaaaaaagtttcatcgtatcgcccaaatccgcagaatccgccaaactgggcgtgaagctgtggcaagggctcaaggccggaaaataa

SEQ ID NO: 68653 - DNA, 1002 bp, Neisseria meningitidis; identical to SEQ ID NO: 36643

SEQ ID NO: 68654 - DNA, 648 bp, Neisseria meningitidis; identical to SEQ ID NO: 38134

SEQ ID NO: 68655 - DNA, 312 bp, Neisseria meningitidis; identical to SEQ ID NO: 37456

SEQ ID NO: 68656 - DNA, 726 bp, Neisseria meningitidis; identical to SEQ ID NO: 55175

SEQ ID NO: 68657 - DNA, 1368 bp, Neisseria meningitidis; identical to SEQ ID NO: 61925

SEQ ID NO: 68658 - DNA, 300 bp, Neisseria meningitidis; identical to SEQ ID NO: 55242

SEQ ID NO: 68659 - DNA, 909 bp, Neisseria meningitidis; identical to SEQ ID NO: 60339

SEQ ID NO: 68660 - DNA, 966 bp, Neisseria meningitidis; identical to SEQ ID NO: 54620

SEQ ID NO: 68661 - DNA, 975 bp, Neisseria meningitidis; identical to SEQ ID NO: 60972

SEQ ID NO: 68662 - DNA, 126 bp, Neisseria meningitidis
ttgcgaaaatacaacggaatcgatcgtaaatctttcccgctgttcttgaaagaatgcgaatttcgatttaacttcggcacaccgtctcaacagcttaaaatcctgcgggattggtgtggaatttag

SEQ ID NO: 68663 - DNA, 204 bp, Neisseria meningitidis; identical to SEQ ID NO: 61802

SEQ ID NO: 68664 - DNA, 2766 bp, Neisseria meningitidis
atgagatcttctttccggttgaagccgatttgtttttatcttatgggtgttatgctatatcatcatagttatgccgaagatgcagggcgcgcgggcagcgaggcgcagatacaggttttggaagatgtgcacgtcaaggcgaagcgcgtaccgaaagacaaaaaagtgtttaccgatgcgcgtgccgtatcgacccgtcaggatatattcaaatccagcgaaaacctcgacaacatcgtacgcagcatacccggtgcgtttacacagcaagataaaagctcgggcattgtgtctttgaatattcgcggcgacagcgggttcgggcgggtcaatacgatggtggacggcatcacgcagaccttttattcgacttctaccgatgcgggcagggcaggcggttcatctcaattcggtgcatctgtcgacagcaattttattgccggactggatgtcgtcaaaggcagcttcagcggctcggcaggcatcaacagccttgccggttcggcgaatctgcggactttaggcgtggatgacgtcgttcagggcaataatacctacggcctgctgctaaaaggtctgaccggcaccaattcaaccaaaggtaatgcgatggcggcgataggtgcgcgcaaatggctggaaagcggagcatctgtcggtgtgctttacgggcacagcaggcgcagcgtggcgcaaaattaccgcgtgggcggcggcgggcagcacatcggaaattttggcgcggaatatctggaacggcgcaagcaacgatattttgtacaagacggccagttgaaattcaattccgacagcggaaaatgggagcgggacttgcaaagacaacagtggaaatacccgtggtataaaaaatacgaaaacccccaagaactgcaaaaatacatcgaagagcatgacaaaagctggcgggaaaacctggcgccgcaatacgacatcacccccatcgatccgtccagcctgaagcagcagtcggcaggtaatctgtttaaattggaatacgacggcgtattcaataaatacacggcgcaatttcgcgatttaaacaccaaaatcggcagccgcaaaatcatcaaccgcaattatcaattcaattacggtttatctttaaactcatatgccaacctcaatctgaccgcagcctacaattcgggcaggcagaaatatccgaaagggtcgaagtttacaggctgggggcttttaaaagattttgaaacctacaacaacgcgaaaatcctcgacctcaacaacaccgccaccttccggctgccccgcgaaaccgagttgcaaaccactttgggcttcaattatttccacaacgaatacggcaaaaaccgctttcctgaagaattggggctgtttttcgacggtccggatcaggacaacgggctttattcctatttggggcggtttaagggcgataaagggctgctgccccaaaaatcaaccatcgtccaaccggccggcagccaatatttcaacacgttctacttcgatgccgcgctcaaaaaagacatttaccgcttaaactacagcaccaataccgtcggctaccgtttcggcggcgaatatacgggctattacggctcggatgacgaatttaagcgggcattcggagaaaactcgccgacatacagggaacattgcaaccagagctgcggaatttatgaacccgtattgaaaaaatacggcaaaaagcgcgccaacaaccattcggtcagcattagtgcggacttcggcgattatttcatgccgttcgccagctattcgcgcacacaccgtatgcccaacatccaagaaatgtatttttcccaaatcggcgactccggcgttcacaccgccttaaaaccagagcgcgcaaacacttggcaatttggcttcaatacctataaaaaaggattgttaaaacaagatgatacattaggattaaaactggtcggctaccgcagccgcatcgacaactacatccacaacgtttacgggaaatggtgggatttgaacgggaatattccgagctgggtcagcagcaccgggcttgcctacaccatccaacaccgcaatttcaaagacaaagtacacaaacacggttttgagttggagctgaattacgattatgggcgttttttcaccaacctttcttacgcctatcaaaaaagcacgcaaccgaccaacttcagcgatgcgagcgaatcgcccaacaatgcgtccaaagaagaccaactcaaacaaggttatgggttgagcagggtttccgccctgccgcgagattacggacgtttggaagtcggtacgcgctggttgggcaacaaactgactttgggcggcgcgatgcgctatttcggcaagagcatccgcgcgacggctgaagaacgctatatcgacggcaccaacgggggaaataccagcaatgtccggcaactgggcaagcgttccatcaaacaaaccgaaacccttgcccgccagcctttgatttttgatttttacgccgcttacgagccgaagaaaaaccttattttccgcgccgaagtcaaaaatctgttcgacaggcgttatatcgatccgctcgatgcgggcaatgatgcggcaacgcagcgttattacagctcgttcgacccgaaagacaaggacgaagacgtaacgtgtaatgctgatggcttgtgcaacggcaaatacggcggcacaagcaaaagcgtattgaccaattttgcacgcggacgcacctttttgataacgatgagctacaagttttaa

SEQ ID NO: 68665 - DNA, 1866 bp, Neisseria meningitidis; identical to SEQ ID NO: 61595

SEQ ID NO: 68666 - DNA, 192 bp, Neisseria meningitidis; identical to SEQ ID NO: 37158

SEQ ID NO: 68667 - DNA, 201 bp, Neisseria meningitidis; identical to SEQ ID NO: 36765

SEQ ID NO: 68668 - DNA, 999 bp, Neisseria meningitidis; identical to SEQ ID NO: 55281

SEQ ID NO: 68669 - DNA, 2088 bp, Neisseria meningitidis; identical to SEQ ID NO: 55290

SEQ ID NO: 68670 - DNA, 534 bp, Neisseria meningitidis
atgggtatttacgattttcaaatgaaagatgcagaaggcaatgcggttgatttgtcaggctatcgcggcaaggttctgctgattgtcaacacggcaacgcgttgcggtctgaccccgcaatacgaggctttgcagaagctgtatgcacaatataccgcagaaggcttggagattttggattttccgtgcaaccagttccgcgaacaggctcccgaaagcagcggagaaattgcccaagtgtgtatgatgaagtttggcacgaagtttaagattttcgacaaaatcgaagtcaatggagcaaataccgcgcccttgtatgcctacctgaaatccgtcaaaccgcaagataaaggcaatcatctgtttaaagatttcgtgttgaagctcgcagctttgggagagaagcgcgacgaaggcgacatcaaatggaactttaccaaattcctcgtcaaccgcgacggcgaagtggtcgagcgttttgcgcctagtgttacgcccgaagaaatcgaagccgatattcgggcattgctgtaa

SEQ ID NO: 68671 - DNA, 1788 bp, Neisseria meningitidis; identical to SEQ ID NO: 61256

SEQ ID NO: 68672 - DNA, 648 bp, Neisseria meningitidis; identical to SEQ ID NO: 61051

SEQ ID NO: 68673 - DNA, 891 bp, Neisseria meningitidis; identical to SEQ ID NO: 61280

SEQ ID NO: 68674 - DNA, 1008 bp, Neisseria meningitidis; identical to SEQ ID NO: 61074

SEQ ID NO: 68675 - DNA, 729 bp, Neisseria meningitidis; identical to SEQ ID NO: 39174

SEQ ID NO: 68676 - DNA, 738 bp, Neisseria meningitidis; identical to SEQ ID NO: 43795

SEQ ID NO: 68677 - DNA, 780 bp, Neisseria meningitidis
atggcagcctcgcccgaagcaaaattcactgaagaaaagattttgtgggtcaaacaccacacgccgaaactcatcactttcgccatcagccgtcccgaatcctaccgttttaaagccggacagttctcccgactcggtttctacgaaggggaaggctttatttggcgtgcctactccatcgtttccgcagaatatgccgacacgctcgaatattttgccgtactcatccaagacggccccatgtcggcccgtttcgccaaaatgcaacagggcgataccatcctgctcgataaaaatgccaccggcttcctcctgcccgaacgcttccccgacggcaaggatttggtgatgctctgcaccggctccggcatcgcccccttcctttccattctcgaacaacccgaaatccggcagcgtttcgataccgtcaacctgatacattccgtatcttttcccgaagaattgattttcaacgaccggctcgccgcattggccgaacatcccctggtaggcgaatacggacactcgttccgtttcgtccctgttaccacccgtgccgccaacccctcgggcttaggcggaaaacgcattccggaactcttaaaaaacaacagcatcgaacaggcgctgcataccaagtttacccccgaatccacacggtttatgatttgcggcaatccggaaatagtcaaagacaccttccaaacgctgcttgacatgggttacgccatgcaccgcaaccgcattcctggtcaaatcatgatggaaaacggcttctaa

SEQ ID NO: 68678 - DNA, 909 bp, Neisseria meningitidis; identical to SEQ ID NO: 56059

SEQ ID NO: 68679 - DNA, 429 bp, Neisseria meningitidis; identical to SEQ ID NO: 55737

SEQ ID NO: 68680 - DNA, 2580 bp, Neisseria meningitidis; identical to SEQ ID NO: 60787

SEQ ID NO: 68681 - DNA, 969 bp, Neisseria meningitidis; identical to SEQ ID NO: 62168

SEQ ID NO: 68682 - DNA, 1881 bp, Neisseria meningitidis; identical to SEQ ID NO: 61916

SEQ ID NO: 68683 - DNA, 1344 bp, Neisseria meningitidis; identical to SEQ ID NO: 61458

SEQ ID NO: 68684 - DNA, 390 bp, Neisseria meningitidis; identical to SEQ ID NO: 38387

SEQ ID NO: 68685 - DNA, 309 bp, Neisseria meningitidis; identical to SEQ ID NO: 38004

SEQ ID NO: 68686 - DNA, 1860 bp, Neisseria meningitidis; identical to SEQ ID NO: 61145

SEQ ID NO: 68687 - DNA, 1410 bp, Neisseria meningitidis; identical to SEQ ID NO: 56141

SEQ ID NO: 68688 - DNA, 1521 bp, Neisseria meningitidis
atgcagctgatcgactattcacattcatttttctcggttgtgccaccctttttggcactggcacttgccgtcattacccgccgcgtactgctgtctttaggcatcggtattctggtcggcgttgcctttttggtcggcggcaaccccgtcgacggtctgacacacctgaaagacatggtcgtcggcttggcttggtcagacggcgattggtcgctgggcaaaccaaaaatcttggttttcctgatacttttgggtatttttacttccctgctgacctactccggcagcaatcaggcgtttgccgactgggcaaaacggcacattaaaaaccggcgcggcgcgaaaatgctgaccgcctgcctcgtgttcgtaacctttatcgacgactatttccacagtctcgccgtcggtgcgattgcccgccccgttaccgacaagtttaaagtttcccgcgccaaactcgcctacatcctcgactccactgccgcgcctatgtgcgtgctgatgcccgtttcaagctggggcgcgtcgattatcgccacgcttgccggactgctcgttacctacaaaatcaccgaatacacgccgatggggacgtttgtcgccatgagcctgatgaactattacgcactgtttgccctgattatggtgttcgtcgtcgcatggttctccttcgacatcggctcgatggcgcgtttcgaacaagccgcgttgaacgaagcccacgatgaaactgccgcttcagacgctaccaaaggtcgtgtttacgcactgattattcccgttttggccttaatcgcctcaacggtttccgccatgatctacaccggtgcacaggcaagcgaaaccttcagcattttgggtgcatttgaaaatacggacgtgaacacttcgctggtattcggcggcacttgcggcgtgcttgccgtcgtcctctgcacgctcggcacgattaaaaccgccgattatcccaaagccgtttggcagggtgcgaaatccatgttcggcgcaatcgccattttaatccttgcctggctcatcagtacggttgtcggcgaaatgcacacgggcgactacctctccacgctggttgcgggcaacatccatcccggcttcctgcccgtcatccttttcctgctcgccagcgtgatggcgtttgccacaggcacaagctgggggacgttcggcatcatgctgccgattgccgccgccatggcggtcaaagtcgaacccgcgctgattatcccgtgtatgtccgcagtaatggcgggggcggtatgcggcgaccactgctcgcccatttccgacacgaccatcctgtcgtccaccggcgcgcgctgcaaccacatcgaccacgttacctcgcaactgccttacgccttaaccgttgccgccgccgccgcatcgggctacctcgcattgggtctgacaaaatccgcgctgttgggctttggcacgacaggcattgtattggcggtgctgatttttctgttgaaagataaaaaacgcgccaacgcctga

SEQ ID NO: 68689 - DNA, 1218 bp, Neisseria meningitidis; identical to SEQ ID NO: 56067

SEQ ID NO: 68690 - DNA, 693 bp, Neisseria meningitidis; identical to SEQ ID NO: 54707

SEQ ID NO: 68691 - DNA, 975 bp, Neisseria meningitidis; identical to SEQ ID NO: 60583

SEQ ID NO: 68692 - DNA, 519 bp, Neisseria meningitidis; identical to SEQ ID NO: 61477

SEQ ID NO: 68693 - DNA, 1185 bp, Neisseria meningitidis; identical to SEQ ID NO: 61972

SEQ ID NO: 68694 - DNA, 774 bp, Neisseria meningitidis; identical to SEQ ID NO: 37582

SEQ ID NO: 68695 - DNA, 438 bp, Neisseria meningitidis
gtggggatgatggggttcgaaaaagttgaacatttattgccggataccgtgttggacattgtggatgtcatcggactggcagcgacggaacagctggtcaaggcgattggcggggcgcggtttaaatttggtaagggcaaggtggacaccgagcgtttggcaattttggtcgaagccatcggcgaagtgaaaacacatgagctgttgcaggtatatggtggcgaggaattgtatgtcccacggtgcggcaaggcgttaatacagttgagaaaccataggttttatcaggagtttgtcaaattgcgcgatattgataaggagagcgggcttatggcgatgacgaagctatgccctaaatacggtatctcttcacgaacaggatatacgattatcaatgaaatgagccgacctgcggcacagcaggcagctttattttag

SEQ ID NO: 68696 - DNA, 1794 bp, Neisseria meningitidis; identical to SEQ ID NO: 45016

SEQ ID NO: 68697 - DNA, 1101 bp, Neisseria meningitidis; identical to SEQ ID NO: 54635

SEQ ID NO: 68698 - DNA, 477 bp, Neisseria meningitidis; identical to SEQ ID NO: 60818

SEQ ID NO: 68699 - DNA, 621 bp, Neisseria meningitidis; identical to SEQ ID NO: 48243

SEQ ID NO: 68700 - DNA, 489 bp, Neisseria meningitidis; identical to SEQ ID NO: 44020

SEQ ID NO: 68701 - DNA, 1458 bp, Neisseria meningitidis; identical to SEQ ID NO: 61608

SEQ ID NO: 68702 - DNA, 1041 bp, Neisseria meningitidis; identical to SEQ ID NO: 55816

SEQ ID NO: 68703 - DNA, 696 bp, Neisseria meningitidis; identical to SEQ ID NO: 55768

SEQ ID NO: 68704 - DNA, 3210 bp, Neisseria meningitidis; identical to SEQ ID NO: 61257

SEQ ID NO: 68705 - DNA, 1446 bp, Neisseria meningitidis; identical to SEQ ID NO: 54468

SEQ ID NO: 68706 - DNA, 792 bp, Neisseria meningitidis; identical to SEQ ID NO: 61305

SEQ ID NO: 68707 - DNA, 369 bp, Neisseria meningitidis; identical to SEQ ID NO: 55405

SEQ ID NO: 68708 - DNA, 132 bp, Neisseria meningitidis; identical to SEQ ID NO: 39343

SEQ ID NO: 68709 - DNA, 183 bp, Neisseria meningitidis; identical to SEQ ID NO: 40813

SEQ ID NO: 68710 - DNA, 1008 bp, Neisseria meningitidis
atgagcaccttcttccggcaaaccgcacaagccatgattgccaaacacatcgaccgtttcccgctattgaagttggaccaggtaattgattggcagccgatcgaacactacctgaaccgtcaaaaaacccgttaccttagagaccaccgcggccgtcctgcctatcccctgctgtccatgttcaaagccgtcctgctcggacaatggcacagcctctccgatcccgaactcgaacacagcctcattacccgcatcgacttcaacctgttttgccgtttcgacgaactgagcatccccgattacagcaccttatgccgctaccgcaactggctggcgcaagacgacaccctgtccgaattgctcaaactgattaaccgccaactgaccgaaaaaggtctaaaaatagagaaagcatccgccgccgtcattgacgccaccattattcagaccgccggcagcaaacagcgtcaggccatagaagttgacgaagaaggacaaatcagcggccaaaccacaccgagtaaagataaagatgcccgttggacaaagaaaaacggtttatacagactcggttacaaacaacatacccgtaccgatgaggaaggctatatcaagaaactgcacatcaccccagccaatgcccatgagtgcaaacacctgtcgcctttgctggaaggactgcccaaaggtacgaccgtctatgccgacaaaggctacgacagtgcggaaaaccggcaacatctggaagaacatcagttgttagacggcattatgcgcaaagcctgccgcaaccggccgctgtcggaaacgcaaaccaaacgtaaccgatatttgtcgaagacccgttatgtggtcgaacaaagcttcggtacgctgcaccgtaaattccgctacgcccgggcagcctatttcggactgattaaagtgagtgcgcaaagccatctgaaggcgatgtgtttgaacctgttgaaagccgccaacaggctaagtgcgcccgctgccgcctaa

SEQ ID NO: 68711 - DNA, 648 bp, Neisseria meningitidis; identical to SEQ ID NO: 55743

SEQ ID NO: 68712 - DNA, 822 bp, Neisseria meningitidis; identical to SEQ ID NO: 55883

SEQ ID NO: 68713 - DNA, 687 bp, Neisseria meningitidis; identical to SEQ ID NO: 42016

SEQ ID NO: 68714 - DNA, 627 bp, Neisseria meningitidis
atgaggaaaatccgcaccaaaatctgcggcatcaccacaccggaagacgcatcggccgccgtagcggcaggtgcagatgccgtcgggctggtctttttccaaggcagcagccgggccgtcgatattgcccgcgccaaaaaaatcaccgccgcactgccgccgtttgtcagcgttgtcgcccttttcgtcaacgaaagcgcgcaaaacatccgccgcatccttgccgaagtgccgatacacatcatccaattccacggcgacgaagacgacacattctgccgtcagttccaccgcccctatatcaaggccattcgtgttcagacgacatcagacatccgaaacgccgccgaccgcttccccgacgctcaggcactgcttttcgatgcctaccatccttcggaatacggcggcaccggacaccgcttcgactggacgctgctggcggaatattcgggcaaaccgtgggtacttgccggcgggctgacccctgaaaacgtcggcgaagccgtccgcatcaccggagcggaagcggtcgatgtatccggcggcgtggaagcgtctaaaggcaaaaaagacccagccaaagtcgccgcctttatcgcaaccaccaaccgcctatcccgttaa

SEQ ID NO: 68715 - DNA, 582 bp, Neisseria meningitidis; identical to SEQ ID NO: 37778

SEQ ID NO: 68716 - DNA, 1050 bp, Neisseria meningitidis
atgcaaaacaacaacgaatttaaaattggtaatcgttcagtaggttacaaccacgaaccattgattatctgtgaaatcggcatcaatcatgaaggctctttaaaaacagcttttgaaatggttgatgctgcctataatgcaggcgctgaagttgttaaacatcaaacacacatcgttgaagacgaaatgtctgatgaggccaaacaagtcattccaggcaatgcagatgtctctatttatgaaattatggaacgttgcgccctgaatgaagaagatgagattaaattaaaagaatacgtagagagtaagggtatgatttttatcagtactcctttctctcgtgcagctgctttacgattacaacgtatggatattccagcatataaaatcggctctggcgaatgtaataactacccattaattaaactggtggcctcttttggtaagcctattattctctctaccggcatgaattctattgaaagcatcaaaaagtcggtagaaattattcgagaagcaggggtaccttatgctttgcttcactgtaccaacatctacccaaccccttacgaagatgttcgattgggtggtatgaacgatttatctgaagcctttctagacgcaatcattggcctgtctgaccataccttagataactatgcttgcttaggagcagtagctttaggcggttcgattttagagcgtcactttactgaccgcatggatcgcccaggtccggatattgtatgctctatgaatccggatacttttaaagagctcaagcaaggcgctcatgctttaaaattggcacgcggcggcaaaaaagacacgattatcgcgggagaaaagccaactaaagatttcgcctttgcatctgtcgtagcagataaagacattaaaaaaggagaattgttgtccggagataacctatgggttaaacgcccaggcaatggagacttcagcgttaacgaatatgaatcattatttggtaaaattgctgcttgtgatattcgcaaaggtgctcaaatcaaaaaaactgatattgaataa

SEQ ID NO: 68717 - DNA, 1293 bp, Neisseria meningitidis; identical to SEQ ID NO: 61205

SEQ ID NO: 68718 - DNA, 1410 bp, Neisseria meningitidis
ttgtttgaatttaaagagaataaaatgattgttgcttcccgctggcccttgctggaaaaggtatttttacggtttggaatgcctgttgccgtggttgatttggaatcgacgggcggcaatctgtatgaagacagggtaaccgaagtggctttggtcaagtttgagcagggaagggtggtgaggcatgagtggttggttaatcctcaaaaaccgattccgcagtttgttgcggggctgacggggatttcagacggcatggttgccgacgcacctgtttttgcagagattgccggcgagttgttttcggtattgaagggttgtgtgctggttgcacataacagccgtttcgactatacgtttttaaagcatgagtttcatcgtgcgggtatcggattttcatcgcctgctttgtgcagtgtgcaactgtcccggtgtctgtatccgcaattttacaagcacagcctggacagtatcatcgaaaggttggggattgttgtggaagacaggcatcgtgcgatggcggatgtatcggcattgtgcgattatttggaatacagtctgtcggaacacggggtcgaggcatggatcaggcagtgtttccgtttgatgaatccgaaaccgctgcctgccgcgctgcccgaacggttgagggaacagttgtacggtttgcctgacagtatgggggtgctggcttgtttcgacggaggagggaaagtaaattacatcggtacgtttgaacgggtatatagcgaggtttcggctttattggattccggaaaagcctcgtttgattggtgcaatacggaggcagtccgtttttttcccgcattgggcaggctgcatgcatataagattaaagcggaattggtcaggcgttatcattcgggttgttatgtgtctgccaaaaatctgctgaaaacatttacgaccgtcaggtttgaaaaaggttcagacggcatgttgaatgcgaaaacaacggctttgaaaaacggtgtgacggataatccgcctaccggattatttgccaataaaaaggcagcgagacgggctttgtcgtcgtgggcggaaacatacggattgtgtcctgccgcagccggtatcctgtcggacggttatacagaggatgagccttgtcccgtatatgtttcaggccgatgcgataaggcgtgcggccgttctgacgaacaggttttggcgtttgcacacaagttgcctattttggattggggaaaaatgcatgaggtagaaattaccgaaactgatcctttaacgggggaaaaagttgttctgcatggaatgggcggcgcattggaaatgggtgacgggctttggtatttcgataaagatttaccggatgcgtttaaggcgaagtttaaaacggacaggaaaaatattaaggaaatcggttaa

SEQ ID NO: 68719 - DNA, 3132 bp, Neisseria meningitidis; identical to SEQ ID NO: 61854

SEQ ID NO: 68720 - DNA, 537 bp, Neisseria meningitidis; identical to SEQ ID NO: 55545

SEQ ID NO: 68721 - DNA, 1155 bp, Neisseria meningitidis
atgaaattcatcgacgaagcaaaaatcgaagtcgccgcaggcaaaggcggtaatggcgcaaccagtttccgccgcgaaaaattcgtaccgcgcggcggcccggacggcggcgacggcggcaaaggcggcagcgtctgggcagaagccgacgaaaacaccaacaccctcgtcgaataccgcttcgttaaacgctaccaagccaaaaacggcgaaaaaggccacggttccgaccgttacggcgcaggtgcggacgacatcgtcctcaaaatgcccgtcggcaccctcatccgcgacctcgacaccgacgaaatcgttgccgacctcacttaccacggacagcgcgtctgcctagccaaaggcggcaaaggcggcttgggcaacatccacttcaaatcctccgtcaaccgcgccccaaaacaatccacgcccggcgaagaaggcgaagcccgttccctgcaactcgaactcaaagtcctcgccgatgtcggcttattgggtatgcccaacgccggcaaatccaccctgattaccgccgtatccgccgcacgccccaaaatcgccaactaccccttcaccaccctgcatccaaacttaggcgtggtacgcatcgacgaaaaccacagcttcgtgatggccgacatccccggcctgattgaaggcgcggcagaaggcgcgggtttggggcatcgtttcctcaaacacttatcgcgcaccggattattgctgcacgtcgtcgatttggcgcccttcgacgaaaccgtcaaccctgccgaagaagcacttgctatcatcaacgaattgcgcaaatacgatgaagaactttacggcaaaccgcgctggctggtgctgaataaactcgacatgcttgacgaagaagaagcccaaacgcgcactgccgccttcctcgaagccgtcggctgggactaccccaaacccgacgaccgtttccaatttgacatggaaaccccgcgcctcttccaaatcagtgcgctgacccaccaaggcacgcaggaattggtacaccaaatcaaccaatacctgaccgagaaaaaacgtatcgaagctgaaaaagccgaagcggagaaagcagcggcaaatgttgaaattatcgaacagcagcctaaaacggatacaggcgtgtttaagccggagtga

SEQ ID NO: 68722 - DNA, 798 bp, Neisseria meningitidis; identical to SEQ ID NO: 61564

SEQ ID NO: 68723 - DNA, 999 bp, Neisseria meningitidis; identical to SEQ ID NO: 60561

SEQ ID NO: 68724 - DNA, 366 bp, Neisseria meningitidis
atgaacctgattcaacagctcgagcaagaagaaattgtccgcctgaacaaagaaattcccgaattcgcaccgggcgacaccgtagtcgtatccgtacgcgtcgtggaaggtacccgcagccgtctgcaagcctacgaaggcgttgtcattgcacgccgcaaccgtggtctgaacagcaacttcatcgtccgcaaaatctccagcggcgaaggtgttgaacgtactttccaactgtactctccgaccgtcgaaaaaatcgaagtcaaacgccgtggtgacgtacgccgtgccaaactgtactacctgcgcggcctgaccggcaaagctgcacgcatcaaagaaaaactgcctgcacgcaaaggttga

SEQ ID NO: 68725 - DNA, 279 bp, Neisseria meningitidis; identical to SEQ ID NO: 36778

SEQ ID NO: 68726 - DNA, 1254 bp, Neisseria meningitidis
gtggacaaactgaaaatctccgcaaacggcccgctcaacggggaaataacggtctcgggcgcgaaaaacgcggcattgccgctgatgtgcgcgggtttgctgacatcgggtacgttgcgcctgaaaaatgtgcctatgctggcagatgtgaaaaccacgcaaaagctgcttcaggggatgggcgcgcgcgtcctgaccgacaatatcagcgaatttgaaatcaacggcggtacggtaaacaatacgtgcgccccttacgagttggtccggacgatgcgcgcttcgattttggtgctgggcccgacgctggcgcgtttcggcgaggcgcaagtcagcctgccgggcggctgcgccatcggttcgcgccccgtcgatcagcatttgaaaggcttggaagcgatgggtgctgagattgttatcgaacacggttacgtcaaggccaaaggcaaactcaaaggtacgcgcgtggcgatggatgtcgttaccgtcggcggcacggaaaacctgctgatggcggcgacgctggcggaaggtacgacggttttggaaaactgcgccatcgagcctgaagtggtcgatttggcggaatgcctggtcaaaatgggcgcgaaaatcagcggcatcggtacgtccacgatgattgtggaaggtgtggacgagctgcacggctgcgaacacagcgtcgtccccgaccggattgaagcggggacgttcctgtgcgcggtggcgataaccggcggcagggtggttttgcggaatgccgccccgaaaacgatggaagtggtgttggacaaactggttgaggcaggtgcggtgattgaagcgggcgacgattggatcgccatcgatatgcggcagcgtccgaaggcggtggacatccgcacggtcgtccaccccggcttccccacggatatgcaggcgcagtttatggcattgaatgccgtggcagagggaagctgccgcgtggtggaaacgatttttgaaaaccgctttatgcacgtccccgagttgaaccggatgggggcgaacatcacaaccgagggcaatacggcatttgtgcagggtgtggaacagctttccggcgcggtcgttaaggcgacggatttgcgtgcgtccgcaagcctcgttatcgccggtttggcggcgcgcggcgaaaccgtggtcgaacagatttaccacttggatcgcggttatgaaaatattgaaaaaaaactcggcagcgtcggcgcgaaaatcgagcgcgtatccggctga

SEQ ID NO: 68727 - DNA, 264 bp, Neisseria meningitidis; identical to SEQ ID NO: 47915

SEQ ID NO: 68728 - DNA, 771 bp, Neisseria meningitidis; identical to SEQ ID NO: 55435

SEQ ID NO: 68729 - DNA, 123 bp, Neisseria meningitidis; identical to SEQ ID NO: 38799

SEQ ID NO: 68730 - DNA, 660 bp, Neisseria meningitidis; identical to SEQ ID NO: 61162

SEQ ID NO: 68731 - DNA, 1068 bp, Neisseria meningitidis; identical to SEQ ID NO: 55503

SEQ ID NO: 68732 - DNA, 870 bp, Neisseria meningitidis; identical to SEQ ID NO: 61629

SEQ ID NO: 68733 - DNA, 867 bp, Neisseria meningitidis
atgaaagcaaaaatcctgacttccgttgcactgcttgcctgttccggcagcctgtttgcccaaacgctggcaaccgtcaacggtcagaaaatcgacagttccgtcatcgatgcgcaggttgccgcattccgtgcggaaaacagccgtgccgaagacacgccgcaactgcgccaatccctgctggaaaacgaagtggtcaacaccgtggtcgcacaggaagtgaaacgcctgaaactcgaccggtcggcagagtttaaaaatgcgcttgccaaattgcgtgccgaagcgaaaaagtcgggcgacgacaagaaaccgtccttcaaaaccgtttggcaggcggtaaaatatggcttgaacggcgaggcatacgcgctgcatatcgccaaaacccaaccggtttccgagcaggaaataaaagccgcatatgacaatatcagcggtttttacaaaggtacgcaggaagtccagttgggcgaaatcctgaccgacaaggaagaaaatgcaaaaaaagcggttgccgacttgaaggcgaaaaaaggtttcgatgccgtcttgaaacaatattccctcaacgaccgtaccaaacagaccggtgcgccggtcggatatgtgccgctgaaagatttggaacagggtgttccgccgctttatcaggcaattaaggacttgaaaaaaggcgaatttacggcaacgccgctgaaaaacggcgatttctacggcgtttattatgtcaacgacagccgcgaggtaaaagtgccttcttttgatgaaatgaaaggacagattgccggcaaccttcaggcggaacggattgaccgtgccgtcggtgcactgttgggcaaggcaaacatcaaacctgcaaaataa

SEQ ID NO: 68734 - DNA, 1929 bp, Neisseria meningitidis; identical to SEQ ID NO: 61329

SEQ ID NO: 68735 - DNA, 822 bp, Neisseria meningitidis; identical to SEQ ID NO: 60653

SEQ ID NO: 68736 - DNA, 1305 bp, Neisseria meningitidis; identical to SEQ ID NO: 54730

SEQ ID NO: 68737 - DNA, 384 bp, Neisseria meningitidis; identical to SEQ ID NO: 38324

SEQ ID NO: 68738 - DNA, 735 bp, Neisseria meningitidis; identical to SEQ ID NO: 61058

SEQ ID NO: 68739 - DNA, 387 bp, Neisseria meningitidis; identical to SEQ ID NO: 55808

SEQ ID NO: 68740 - DNA, 507 bp, Neisseria meningitidis
atggatttttttaattttttcgagcaaggatattttaaaaaactcgcggttgaaaatggattaaatactgaatattttatatttcaatttacagtatgtaatctatttagtattttcgttattattttaatgaattttataaaaaattacgctgtgcttattgttttaatagtaattgttagtatattatctggactaattttgaaaaataaaactatgtctttaataaagaataaagaaaaatttttatgtggtttgtttccgttggatgtaccgatttttaaatatacaatgcctagttattttaaacttataaataagaatatgaggtggctttttcacatgaatgttttctgtttattttttatttgtttttcaatatatctaattaataaaggagagaatcagtatattgcttattttagttgttattttttcggacttacttatccattaattaattatttgatattattacacagagaatataaacgtattcagttctaa

SEQ ID NO: 68741 - DNA, 621 bp, Neisseria meningitidis; identical to SEQ ID NO: 37903

SEQ ID NO: 68742 - DNA, 594 bp, Neisseria meningitidis; identical to SEQ ID NO: 55822

SEQ ID NO: 68743 - DNA, 786 bp, Neisseria meningitidis; identical to SEQ ID NO: 61811

SEQ ID NO: 68744 - DNA, 2151 bp, Neisseria meningitidis; identical to SEQ ID NO: 61995

SEQ ID NO: 68745 - DNA, 453 bp, Neisseria meningitidis; identical to SEQ ID NO: 54351

SEQ ID NO: 68746 - DNA, 1788 bp, Neisseria meningitidis; identical to SEQ ID NO: 54387

SEQ ID NO: 68747 - DNA, 483 bp, Neisseria meningitidis; identical to SEQ ID NO: 40363

SEQ ID NO: 68748 - DNA, 405 bp, Neisseria meningitidis; identical to SEQ ID NO: 54850

SEQ ID NO: 68749 - DNA, 1098 bp, Neisseria meningitidis; identical to SEQ ID NO: 36189

SEQ ID NO: 68750 - DNA, 210 bp, Neisseria meningitidis; identical to SEQ ID NO: 39235

SEQ ID NO: 68751 - DNA, 1296 bp, Neisseria meningitidis; identical to SEQ ID NO: 61253

SEQ ID NO: 68752 - DNA, 1926 bp, Neisseria meningitidis
gtgaccgtaggctacggcttcagtgccggtggcgattacagccaaagcaaaatccgagccgaccatgcttcggtaaccgagcaaagcggtatttatgccggagaagacggttatcaaatcaatgtgcagaaccacaccgatttgaaaggcggtttgattacttccacccaaaaatcggaagacgatggcaaaaacacattctcaacgggtacgctcacctttgaagacctagcgaatcacgccgaatataagggtgaagcgattggtttgggtgtttcaggcagcgttgcgggcgataatccaaatcaaaacagccgtatttataccgttaatcaaagcggtatgagtagcacaatgggctatggcaaagacagcgacaaacaatacgccacaacccattcaggcattaacactgccaatatcaccattcgtgataacgaaaaacaacagcaaatcacaggaatatcggcggaagaagcgaaacgggctgttaaagccgatgtaacaaccgacaactacgccgaacattcaggcagcctgaaaaacaatttcgataaagacaaagtgcaatcagagattgatttgcaggttaaggttacacaggagtttgatagtaatcgcaaagccttgcgtgcagaaatcaacaaagcagcagatgaaaaaagacaaaaagccgaagatataagaagagaaaattatattgacggcaaaaacggttataacaccgcagaatctttggctttggataagtctgccgacaaattggaaaaagtcgctttttacactgatttggcattaggtggattgtatggaattggcgatagcacggctttaacttatgtaacaggtagtgcagtggctaatccagccattcgagcgggtacaagaccaagacagttttggtttgagaaatgtgacggcgatagtttgtattgttctaatagaaattatgacgatacggcggatagaaaaatttatgataaaaacgggcaagaaattgacactaaagatccaaattacactggaatggttgagattggtgataaacggcaaatctctgatttaaatgagattgaacctaacaaagtaactggaagcatcgttactacaaatgacggtatattgaacccacgaaatgacgctctcaaaaatgggattaagcaacaaaaatgggaagtagataaggaaggtattttgcttatctacaatccgccaacaggcaattctatttctgaacttttgtatgccgcttatgataaaactaacgatttgttaggcggtcgtttgcctttagcttctgcacaaaaagcgaaccttgaattaaatcaatatgcagaaagtaaaggttataagattgatagtaacaatcatagtcgtggcggtttaactcgaagtgtttctgataaatattcagtcagacataatctgcctttaccgtataacaatgttcaattcttcggtagtgcggcaaatgtagatgattacacaaactacatgaacgaatatggtaggaaagattttaatatttctgccacaacacattacacagattttgttggtagaactccattagttgcattgcgtagtaagcatattgttggtggaaatgaaccaacaggcggagttgaagataaatggttcttatattcgcacagcagttattttgcagaaaaaccaaccccataccttgtaaatgaacacggtttttatatggataaaaatggcgacctgataaaagataattcaggaaatcctataaaaatgacggaagaaaataaattggaatattcaacaaaagttccaaatccatatttagatgattttgaacagaaatggataaaaggacaaactcataacaaggtgtcaggtgataatccgtctcttccagttccagttagaacaaaaaaacaacagggagagcgataa

SEQ ID NO: 68753 - DNA, 759 bp, Neisseria meningitidis; identical to SEQ ID NO: 61933

SEQ ID NO: 68754 - DNA, 786 bp, Neisseria meningitidis; identical to SEQ ID NO: 55814

SEQ ID NO: 68755 - DNA, 366 bp, Neisseria meningitidis; identical to SEQ ID NO: 38539

SEQ ID NO: 68756 - DNA, 1935 bp, Neisseria meningitidis
atgagcttgatcgaatgtaaaaacatcaaccgctatttcggcagcggcgagaaccgcgtccatattttgaaagacatcagcctgtcgatagagaagggcgattttgtcgccatcatcgggcagtccggttcgggcaagtccacgctgatgaacatactcggctgtttggataccgccggttccggttcgtaccgaatcgacggcatcgaaactgccaaaatgcagcctgacgagctggcggcattgcgccgcgaacgcttcggtttcatcttccaacgctacaacctcttaagctcgctgaccgcaagggacaacgtcgcgctgccagccgtgtatatgggcgcgggcggcaaagagcgttccgcgcgtgcggagaagttgttgcaggatttgggtttggcaagcaaagagggcaacaagcccggcgaactctcgggcggacagcagcagcgcgtctccatcgcccgcgccctgatgaacggcggagaaatcatcttcgccgacgagccgaccggcgcgctcgataccgccagcggcaaaaacgtgatggaaatcatccataagctgcacgaagccgggcataccgtcattatggtcacgcacgaccccggcatcgccgccaatgccaaccgcgtcatcgaaatccgggacggcgaaatcatttccgacacctcgaaaaatccagaaatccccgcaagcaatgtcgggaggattcaggaaaaagcctcgtggtcgttttattacgaccagtttgtcgaagccttcagaatgtcggtgcaagcagtattggcgcacaaaatgcgttcgcttctgacgatgctcggcatcatcatcggtatcgcttcggttgtctccgtcgtcgcattgggcaatggttcgcagaaaaaaatccttgaagacatcagttcgatagggacgaacaccatcagcatcttcccggggcgcggcttcggcgacaggcgcagcggcaggattaaaaccctgaccatagacgacgcaaaaatcatcgccaaacaaagctacgttgcttccgccacgcccatgacttcgagcggcggcacgctgacctaccgcaataccgacctgaccgcttctttgtacggcgtgggcgaacaatatttcgacgtgcgcggactgaagctggaaacggggcggctgtttgacgaaaacgatgtgaaagaagacgcgcaggtcgtcgtcatcgaccaaaatgtcaaagacaaactctttgcggactcggatccgttgggtaaaaccattttgttcaggaaacgccccttgaccgtcatcggcgtgatgaaaaaagacgaaaacgctttcggcaattccgacgtgctgatgctttggtcgccctatacgacggtgatgcaccaaatcacaggcgagagccacaccaactccatcaccgtcaaaatcaaagacaatgccaatacccaggttgccgaaaaagggctgaccgatctgctcaaagcgcggcacggcacggaagatttcttcatgaacaacagcgacagcatcaggcagatagtcgaaagcaccaccggtacgatgaagctgctgatttcctccatcgccctgatttcattggtagtcggcggcatcggcgtgatgaacatcatgctggtgtccgttaccgagcgcaccaaagaaatcggcatacggatggcaatcggcgcgcggcgcggcaatattttgcagcagtttttgattgaggcggtgttaatctgcgtcatcggcggtttggtcggcgtgggtttgtccgccgccgtcagcctcgtgttcaatcattttgtaaccgacttcccgatggacatttccgccatgtccgtcatcggcgcggtcgcctgttcgaccggaatcggcatcgcgttcggctttatgcctgccaacaaggcggccaaactcaatccgatagacgcattggcgcaggattga

SEQ ID NO: 68757 - DNA, 735 bp, Neisseria meningitidis; identical to SEQ ID NO: 55585

SEQ ID NO: 68758 - DNA, 360 bp, Neisseria meningitidis; identical to SEQ ID NO: 42498

SEQ ID NO: 68759 - DNA, 1254 bp, Neisseria meningitidis
atgcgtaaacccagaatcacccatttggatgtttgggcaaacgatgaaagaatcggtactttggaaaagggggcaatgtaccgtttcacatatgacaaccccggttctccattgttgggtttgcactatcaggataggggtaaagtatatatcagcaacaacatgccgcatatctttgcacagtattttccggaaggctttttggatgcacacatcacaagcaaatatgcttttcatgatgcgccttttgaagacaatgagatgctgcgcttggcaattctgggcagagagactttgggtcggatacatgtgcgctgtaatgacccgctttttaatgaatggattgacgggttggagatgaaaaatccaagaatattgactgaacgggatttgctgggcataaatgcccgacaggtttttcagcaatatatggcagaaatcttccatcacggtcgtttcgtcagtgtatccgggatacagcagaagatgtccttagatgccatcagcagaaataccaagcaaactgcctcatatattgccaaaggttttgatgcatccgaatatccttgcttggctgccaatgaatttttatgcatgcagaccatcaaacaagcaggtattccggttgcacaaaccagcctgtcggaagattcatcagtcttattggtacgtcggtttgatgtcagtgaacaggagtatttcttaggcatggaagactttaccagtctgcgtcagtattcagcagaagataaatataaaggcagttatgcggctattgcacagattatccgacagatatccggcaggcccgatgaagatttaatccatttttttaaccagcttgccgccagttgcatattgaaaaacggggatgcacaccttaaaaatttttcagtactctatcatgacgaatacgatgtacgtcttgcacctacctatgatgtattggatacatcaatatacagggttggaacacaaggaatttttgatgcttatgacgatacgctggcattaaacctgactaaccacggtaagaaaacatatccttccaagaatacattgttggattttgctgagaaatattgcgatttgggaagagaagatgcatcctttatgatagatacaatcgttcaagctaaagaacaggttcttgttaaatactcggatgtattgcgtgagaatgaatggttggcgcagaagtggcattttatcccggatgaaaatgaagaaggtctaccgtttacattccggtag

SEQ ID NO: 68760 - DNA, 519 bp, Neisseria meningitidis; identical to SEQ ID NO: 36779

SEQ ID NO: 68761 - DNA, 1248 bp, Neisseria meningitidis; identical to SEQ ID NO: 55818

SEQ ID NO: 68762 - DNA, 954 bp, Neisseria meningitidis; identical to SEQ ID NO: 54637

SEQ ID NO: 68763 - DNA, 288 bp, Neisseria meningitidis; identical to SEQ ID NO: 36916

SEQ ID NO: 68764 - DNA, 858 bp, Neisseria meningitidis; identical to SEQ ID NO: 54973

SEQ ID NO: 68765 - DNA, 924 bp, Neisseria meningitidis; identical to SEQ ID NO: 55898

SEQ ID NO: 68766 - DNA, 846 bp, Neisseria meningitidis; identical to SEQ ID NO: 55616

SEQ ID NO: 68767 - DNA, 621 bp, Neisseria meningitidis; identical to SEQ ID NO: 54208

SEQ ID NO: 68768 - DNA, 621 bp, Neisseria meningitidis
atgaccacacatcatgtcgaattgaggaaggtaaccaaacggttcggggcgcaaaaagccgttaaccaagtcgatttggttttgaaggcaggagaaagcgtcgggcttgccggacacaacggcgcgggcaagtccaccattatgaagctgatactcgggctgattaccccgaccgaaggcgaagtgatgcttttgggcgaacgtaccggcagcaaagcgggggcgcggcttcgcagccaaatcggctacctgcccgaaactgttgcgttgcacccttcgctgaccggcatcgaaacgctggatttttatgccaaacttaaaaaacagccgctcacgcagaatcgggggctgctcgagcgcgtcggcatttcacaggcggcacaccgccgcgtcggcacttattctaaagggatgcgccaacgccttgccttggcacaagccctgctgggcgagcccaaagtcctgctgtttgacgaaccgacaaccggcctcgaccctgcatcaaggcaaatgttttacgaagtcgtgcgcgaactcaacgggcgcggcgcgaccgtattgctcagtacccacgcccttgccgagttggacgggcacgccgaccgcattatcgtggattaa

SEQ ID NO: 68769 - DNA, 1374 bp, Neisseria meningitidis; identical to SEQ ID NO: 38214

SEQ ID NO: 68770 - DNA, 1002 bp, Neisseria meningitidis; identical to SEQ ID NO: 60373

SEQ ID NO: 68771 - DNA, 2214 bp, Neisseria meningitidis; identical to SEQ ID NO: 54944

SEQ ID NO: 68772 - DNA, 903 bp, Neisseria meningitidis; identical to SEQ ID NO: 61938

SEQ ID NO: 68773 - DNA, 591 bp, Neisseria meningitidis
atgcttttgtttatcgacaattacgacagttttacttacaacatcgtccagtatttcgcagaattggggcaggaagttgccgtgcgccgcaacgatgatattacgttggaggaaatcgaggcattgaatccgcaatatctcgttatcggacccggtccgtgttcgcccaaagaagcggggatttccgtggcggcgatgcgccatttcgccggcaggctgccgattatgggtgtgtgcctcgggcatcagacgataggcgaggcgttcggcggcaggatagtccgcgccaaaacgctgatgcacggtaaggtgtcgcccgtgtcccattcgggcaaggggatgtttaagggtttgcccaatccggttacctgtacgcgttatcacagcctcgttatcgaacgcggcacgctgcccgaatgtttggaaatcacggcatggacggaagacggcgagattatgggcgtgcgccataaggaatatgccgttgagggggtacaattccaccctgaagccctcttgaccgaacacggacatgatatgttaaacaattttttaatcgaatttcaaaacttcaaaccgcaaaaaatctga

SEQ ID NO: 68774 - DNA, 195 bp, Neisseria meningitidis; identical to SEQ ID NO: 61047

SEQ ID NO: 68775 - DNA, 864 bp, Neisseria meningitidis; identical to SEQ ID NO: 62526

SEQ ID NO: 68776 - DNA, 624 bp, Neisseria meningitidis; identical to SEQ ID NO: 60631

SEQ ID NO: 68777 - DNA, 1011 bp, Neisseria meningitidis; identical to SEQ ID NO: 38121

SEQ ID NO: 68778 - DNA, 1035 bp, Neisseria meningitidis; identical to SEQ ID NO: 61648

SEQ ID NO: 68779 - DNA, 483 bp, Neisseria meningitidis; identical to SEQ ID NO: 55730

SEQ ID NO: 68780 - DNA, 990 bp, Neisseria meningitidis; identical to SEQ ID NO: 60407

SEQ ID NO: 68781 - DNA, 258 bp, Neisseria meningitidis; identical to SEQ ID NO: 56044

SEQ ID NO: 68782 - DNA, 891 bp, Neisseria meningitidis; identical to SEQ ID NO: 61286

SEQ ID NO: 68783 - DNA, 1977 bp, Neisseria meningitidis
atgaacgaattttcgcttgcccctattgtggttgttttgctggtgtcggtcattacggtgatcctgtgccgcaagttcaacattccctccatgctgggctacctgctggtgggctttttggcggggcccggtatgctcagcctgattccgaaaagccatgcgacggattatttgggtgaaatcgggattgtgttcctgatgttcagcattggtttggagttctcgctgcccaagttgagggcgatgaggcggctggtattcgggctgggcggtttgcaggtcggcgttacgatgctgtcggtaatgggcatactgatgctgacgggcgtgccgttcaattgggcgtttgccgtgtcgggcgcgttggcgatgtcgtccacggcgattgtgagccggattttgtcggaaaagacggaattggggcagccgcacggtcagatggcgatgggcgtgctgctgatgcaggacatcgccgtcgtgccgctgatgattctgattcccgcgctggcgggcggaggggacggaaatatttgggcggccttgggtttggcgtttgcaaaaatgctgctgacgctggggctgctgtttttcgtcggcagcaaaattatgtcgcgatggttcaggatggtggcaaaacgcaaatcgtccgaactctttatgatcaatgtgctgctggtaaccttgggtgtggcttatctgactgagctggaaggtttgtctatggcgttgggcgcgtttgtggcggggatgctgctttcggaaacggaataccgtttccaagtcgaagacgacatccgcccgttccgcgatattttgctcggctttttctttatcacggtcggcatgaagctggacattcaggcattgatcggcggctggcggcaggtattgatgctgttggtaatgctgctggtgttgaaggcactggttgtgtttgccattgccttcaaaatgaaacattcggtcggcgacagcctcaaaacggctttgtatctcgcacaaggcggcgagttcggcttcgtgatgctggccattgccgggcagcttgatatggtttcgccagaatgggaacaggcggcgacggcggcggtgctgctgtcgatgattatcgcgcccttcctcttgggcggcagcgatgcgctggtcgggcgtttggtcaagtcaagctgggacatgaagtcgctcgatctgcacagtatgctggtagaaaccatgagcaagtccgaccatgtgctgattgtcggcttcggcaggggcgggcagacggtcggacgcgtccttgcccaagaggatattccgtatttcgcgctcgacttggacattgcgcgggtgcaggttgccagaagtgcgggcgaaccggtgtcgttcggcgatgcgaaacgcagggaagtattggaagccgccggtttggggcgggcgaaaatggtggtgctgacgctcaacaatatgcacgaaacgcaacacgttttagacaatgtgctgtccatgtatcccaatatgcccgtatatgtgcgcgccaccaacgacgattatgtgaaaacgtttaccgatataggtgcggaagaagccgtgtcggacaccaaagaaaccggactcgtgctggcaggctatgcgatgttaggcaacggcgcgtcgtaccggcacgtctatcagacgatggcaaatatccgccacagccgttatgccgcgttggagggtttgtttgtcggtagtgatgatgaggcaggattcggcgaaaatggcgaaaccgtccgccacgcctttcctttggctgcagaagcatacgccgtcggcaaaacagtcggcacgcttccgatggcggcttacggcatcaaactcttgttcgtccgccgccgcacaggccggattgaaaacccggatgcctcgtttacattggaaggcggtgacgtgttggtggtcgcaggcaaaaaagaagaaattatctcttttgaaaactggagtttgcagggaatataa

SEQ ID NO: 68784 - DNA, 2970 bp, Neisseria meningitidis; identical to SEQ ID NO: 61926

SEQ ID NO: 68785 - DNA, 1065 bp, Neisseria meningitidis; identical to SEQ ID NO: 62015

SEQ ID NO: 68786 - DNA, 435 bp, Neisseria meningitidis; identical to SEQ ID NO: 39366

SEQ ID NO: 68787 - DNA, 1194 bp, Neisseria meningitidis; identical to SEQ ID NO: 61469

SEQ ID NO: 68788 - DNA, 711 bp, Neisseria meningitidis; identical to SEQ ID NO: 61529

SEQ ID NO: 68789 - DNA, 1131 bp, Neisseria meningitidis; identical to SEQ ID NO: 59617

SEQ ID NO: 68790 - DNA, 321 bp, Neisseria meningitidis; identical to SEQ ID NO: 39509

SEQ ID NO: 68791 - DNA, 1101 bp, Neisseria meningitidis; identical to SEQ ID NO: 61524

SEQ ID NO: 68792 - DNA, 237 bp, Neisseria meningitidis; identical to SEQ ID NO: 37424

SEQ ID NO: 68793 - DNA, 309 bp, Neisseria meningitidis; identical to SEQ ID NO: 52268

SEQ ID NO: 68794 - DNA, 717 bp, Neisseria meningitidis; identical to SEQ ID NO: 61053

SEQ ID NO: 68795 - DNA, 627 bp, Neisseria meningitidis
atgtatacaggcgaacgcttcaatacttacagccatttgagcggtttgattctggcggcggcaggtttggtgctgatgctgctgaaaaccataggacacggggacggctaccgtatcttcagcgtatcggtttacggcatcagccttcttctgctctatttgagttcctcgctgtaccacggaattgcagccggaaaactgaaaagcattttgaaaaaaaccgaccactgcatgatttatgtcctgattgccggaagctacacaccgtttgcactggtttctttgagaaacgggccgggctggacggtattttcactgtcctggctgctggcggctgcaggaatcgcacaagaactcaccatcggacggaaaagcgaaaaacgtctgctgtctattgtgatttatgtcgtcatgggttggatggtcttggcggtaatgaaatccctgacagcctcactcccgtcggcaggactggcttggctggcggcaggcggtatgctgtacagcgtcggcatttactggtttgtaaacgatgaaaaaatccgacacgggcacggaatctggcatctgttcgtattgggcggcagcatcacccaatttgtcagtgtgtacggttatgtaatctga

SEQ ID NO: 68796 - DNA, 816 bp, Neisseria meningitidis
atgagaccatatgctactaccatttatcaactttttattttgtttattgggagtgtttttactatgacctcatgtgaacctgtgaatgaaaagacagatcaaaaagcagtaagtgcgcaacaggctaaagaacaaaccagtttcaacaatcccgagccaatgacaggatttgaacatacggttacatttgattttcagggcaccaaaatggttatcccctatggctatcttgcacggtatacgcaagacaatgccacaaaatggctttctgacacgcccgggcaggatgcttactccattaatttgatagagattagcgtctattacaaaaaaaccgaccaaggctgggttcttgagccatacaaccagcaaaacaaagcacactttatccaatttctacgcgatggtttggatagcgtggacgatattgttatccgaaaagatgcgtgtagtttaagtacgactatgggagaaagattgcttacttacggggttaaaaaaatgccatctgcctatcctgaatatgaagcttatgaagataaaagacatattcctgaaaatccatattttcataaactttactatattaaaaaaggagaaaatccggcgattattactcatcggaataatcgaataaaccaaactgaagaagataattatagcactagcgtaggttcctgtattaacggtttcacggtacggtattacccgtttattcgggaaaagcagcagctcacacagcaggagttggtaggttatcaccaacaagtagagcaattggtacagagttttgtaaacaatccaagtaaaaaataa

SEQ ID NO: 68797 - DNA, 492 bp, Neisseria meningitidis; identical to SEQ ID NO: 61194

SEQ ID NO: 68798 - DNA, 2106 bp, Neisseria meningitidis
atggctcgtaagaccccgatcagcctgtaccgtaacatcggtatttccgcccatatcgatgcgggtaaaaccacgacgacagaacgtattttgttctataccggtttgacccacaagctgggcgaagtgcatgacggtgcggctactaccgactacatggaacaagagcaagagcgcggtattaccattacctccgctgccgttacttcctactggtccggtatggcgaaacaattccccgagcaccgcttcaacatcatcgacaccccgggacacgttgactttaccgtagaggtagagcgttctatgcgtgtattggacggcgcggtaatggtttactgcgcggtgggcggtgttcaaccccaatctgaaaccgtatggcggcaagccaacaaataccaagtgccgcgcttggcgtttgtcaataaaatggaccgtcagggtgccaacttcttccgcgttgtcgagcaaatgaaaacccgtttgcgcgcaaaccctgtacctatcgtcattccggttggtgcggaagacaacttcagcggtgtggttgatttgttgaaaatgaaatccatcatttggaatgaagccgataaaggtacaacctttacctatggcgatattcctgccgaattggtcgaaactgccgaagaatggcgtcaaaatatgattgaagccgcagccgaagccagcgaagaactgatggacaaatacttaggcggcgacgagctgaccgaagaagaaatcgtaggcgcgttgcgtcaacgtactttggcaggcgaaattcagcctatgttgtgtggttctgcatttaaaaacaaaggtgttcaacgtatgttggacgcagttgtagaattgctgccagctcctaccgatattcctccggttcaaggtgtcaacccgaataccgaggaagccgacagccgtcaagccagcgatgaagagaaattctctgcattggcgttcaaaatgttgaacgacaaatacgtcggtcagctgacctttatccgcgtttactcaggcgtagtaaaatccggcgataccgtattgaactccgtaaaaggcactcgcgaacgtatcggtcgtttggtacaaatgactgccgcagaccgtactgaaatcgaagaagtacgcgccggcgacatcgcagccgctattggtctgaaagacgttactaccggtgaaaccttgtgtgcggaaagcgcgccgattatcttggaacgtatggaattccccgagccggtaatccatattgccgttgagccgaaaaccaaagccgaccaagagaaaatgggtatcgccctgaaccgcttggctaaagaagacccttctttccgtgtccgtacagacgaagaatccggtcaaaccattatttccggtatgggtgagctgcacttggaaattattgttgaccgtatgaaacgcgaattcggtgtggaagcaaatatcggtgcacctcaagtggcttaccgtgaaactatccgcaaagccgttaaagctgaatacaaacacgcgaaacaatccggtggtaaaggtcaatatggtcacgttgtgattgaaatggaacctatggaaccggggggcgaaggttacgagtttatcgatgaaattaaaggtggcgtgattcctcgcgaattcattccgtctgtcgataaaggtatccgcgatacattgcctaacggtatcgttgccggctatcctgtagttgatgtacgtatccgtctggtattcggttcttaccatgatgtcgactcttcccaattggcatttgaattggccgcttctcaagcgtttaaagaaggtatgcgtcaagcatctcctgccctgcttgagccgattatggcagttgaagtggaaactccggaagaatacatgggcgacgtaatgggcgacttgaaccgccgtcgcggtgttgtattgggtatggatgatgacggtatcggcggtaaaaaagtccgtgccgaagtacctctggcagaaatgttcggttattcgaccgacctgcgttctgcaacccaaggccgcgctacttactctatggagttcaagaaatattctgaagctcctgctcacatagctgctgctgtaactgaagcccgtaaaggctaa

SEQ ID NO: 68799 - DNA, 483 bp, Neisseria meningitidis; identical to SEQ ID NO: 61496

SEQ ID NO: 68800 - DNA, 453 bp, Neisseria meningitidis; identical to SEQ ID NO: 45863

SEQ ID NO: 68801 - DNA, 1251 bp, Neisseria meningitidis
atgaccaaactgacacgaagacaaatcatccgccgcaccgccggcacactgttcgccctaagccccatcgcatccgccgttgccaaaacggtacgcgtaccacaattcaccgccgcacggatatggccgtcccacacctacacccgcctgacgctggaaagcaccgccgcgctcaaataccagcacttcgcgctcgacaatccgggcaggctggtcgtcgatatacaaaacgcgaacatcaataccgtattgcacggactttcccaaaaagttatggcggacgacccctttatccgcagcatacgcgccggtcagaacacgcccgacaccgtccgcctcgtcatcgatttgaaacagccttcctacgcgcaagttttttccctcccacccgtcggcggctttaaaaaccgcctcgtcgtcgatctctatccgcaagggatggatcccgacgatccgatgatggcgctgcttaacggcagcctgaacaaaacccgtcgcggctcccctgaagccgacctcgctcaaaacactcccgcacaaaccgaacgcggcaaaaacgggcgcagacccgtcattatgatcgaccccggacacggcggcgaagaccccggcgccgtcagcccgggcggtttgcaggaaaaacacgtcgtcctctccatcgcccgcgaaaccaaaaaacaattggaagccttgggttacaacgtctttatgacgcgcaacgaagacgtgttcatcccattgggcgtgcgtgtcgccaaagggcgcgcacggcgggcggacgtattcgtctccatccacgccgacgctttcaccagcccctccgcgcgcggaacgggggtttatatgctgaacaccaaaggcgcgaccagctctgccgccaaattcttggaacaaacccaaaataatgccgacgcggtcggcggcgtaccgaccagcggcaaccgcaatgtcgataccgccctgctcgacatgacccaaaccgccacgctgcgcgacagccgcaaactcggcaaactggtgcttgaagaattgggcaggctcaaccatctgcacaaaggcagggtggacgaagccaatttcgccgttttgcgcgcacccgatatgccgtctatcctggtcgaaaccgccttcctgtccaatcctgccgaagagaagctgctgggcagcgaatccttccgccggcagtgcgcccaatccatcgcctcgggtgtccaacgctacctcaatacatccgtattgaagcggggttga

SEQ ID NO: 68802 - DNA, 948 bp, Neisseria meningitidis; identical to SEQ ID NO: 55151

SEQ ID NO: 68803 - DNA, 1116 bp, Neisseria meningitidis; identical to SEQ ID NO: 55264

SEQ ID NO: 68804 - DNA, 1746 bp, Neisseria meningitidis; identical to SEQ ID NO: 60424

SEQ ID NO: 68805 - DNA, 801 bp, Neisseria meningitidis; identical to SEQ ID NO: 53459

SEQ ID NO: 68806 - DNA, 546 bp, Neisseria meningitidis; identical to SEQ ID NO: 54605

SEQ ID NO: 68807 - DNA, 2016 bp, Neisseria meningitidis; identical to SEQ ID NO: 61599

SEQ ID NO: 68808 - DNA, 4476 bp, Neisseria meningitidis; identical to SEQ ID NO: 55788

SEQ ID NO: 68809 - DNA, 504 bp, Neisseria meningitidis; identical to SEQ ID NO: 54547

SEQ ID NO: 68810 - DNA, 651 bp, Neisseria meningitidis; identical to SEQ ID NO: 61285

SEQ ID NO: 68811 - DNA, 2385 bp, Neisseria meningitidis; identical to SEQ ID NO: 56014

SEQ ID NO: 68812 - DNA, 1344 bp, Neisseria meningitidis; identical to SEQ ID NO: 55605

SEQ ID NO: 68813 - DNA, 435 bp, Neisseria meningitidis; identical to SEQ ID NO: 43698

SEQ ID NO: 68814 - DNA, 618 bp, Neisseria meningitidis; identical to SEQ ID NO: 54758

SEQ ID NO: 68815 - DNA, 147 bp, Neisseria meningitidis
atgaaaacgctgttttttgactgttccattattcacaaaagggaaaaaacgattacctgccccgtgtaccaaaacctgccctgccggatgaagggcataactggcagggacggcgtcaacaccatatgggggtacggcttttcttga

SEQ ID NO: 68816 - DNA, 1257 bp, Neisseria meningitidis; identical to SEQ ID NO: 54292

SEQ ID NO: 68817 - DNA, 954 bp, Neisseria meningitidis; identical to SEQ ID NO: 47463

SEQ ID NO: 68818 - DNA, 1077 bp, Neisseria meningitidis; identical to SEQ ID NO: 60349

SEQ ID NO: 68819 - DNA, 237 bp, Neisseria meningitidis; identical to SEQ ID NO: 45833

SEQ ID NO: 68820 - DNA, 474 bp, Neisseria meningitidis; identical to SEQ ID NO: 60614

SEQ ID NO: 68821 - DNA, 657 bp, Neisseria meningitidis; identical to SEQ ID NO: 55521

SEQ ID NO: 68822 - DNA, 360 bp, Neisseria meningitidis; identical to SEQ ID NO: 38354

SEQ ID NO: 68823 - DNA, 390 bp, Neisseria meningitidis
atgcccaagccctatcctgcacgctatcgtgccaatcccaaccgaaaaggaaaaataatgagcagcgaattgattatacacaccagcgatgccgcttttgaaaaagacgttttaaattcagatacccccgtcctgctggacttttgggctccgtggtgcggcccctgcaaaatgattgccccgattttggacgacatcgccgccgaatttgaaggccgtctgaaagtggtcaaaatcaacatcgacgacaacgaagccaccccgtcccgtttcggcgtgcgcggcattccgaccctgatggtgttcaaaaacggcgaagtcgtggctaccaaagtcggcgcattggcaaaaggtcagctgaccgcctttgtcgaagcctccatcgcctga

SEQ ID NO: 68824 - DNA, 1410 bp, Neisseria meningitidis; identical to SEQ ID NO: 54261

SEQ ID NO: 68825 - DNA, 633 bp, Neisseria meningitidis; identical to SEQ ID NO: 50523

SEQ ID NO: 68826 - DNA, 510 bp, Neisseria meningitidis; identical to SEQ ID NO: 54788

SEQ ID NO: 68827 - DNA, 462 bp, Neisseria meningitidis; identical to SEQ ID NO: 39618

SEQ ID NO: 68828 - DNA, 543 bp, Neisseria meningitidis; identical to SEQ ID NO: 42127

SEQ ID NO: 68829 - DNA, 1467 bp, Neisseria meningitidis; identical to SEQ ID NO: 60362

SEQ ID NO: 68830 - DNA, 216 bp, Neisseria meningitidis; identical to SEQ ID NO: 63430

SEQ ID NO: 68831 - DNA, 984 bp, Neisseria meningitidis
gtgctgctgacgctgcatggaacggataagttctgcatcgttaataatttccataccaaccgtaatacggcgtataaggctttgaaagatacctgtaacaacctttttgaacgccaattcagttttatcgaaaaaacaccaaaaggggaaaaggtagtacggacaaggtgggtatctcaagtcgcctatattgaacaacaggcaacggtagagttagtttttgcaccaaatgttgcccctttgattacgatgctagaaaaaaacttcacaagctacgagcttgatcaggtctcatcgttgagcagtaaatacgcggtgcggctctacgaaattattatttcatggcgtgcagccggtaagacaccgatgttcagtacaatggagttgcgcgaacgtttgggtatgatgcctgacgagtatcaaaaaatggagctattcaaacgtaaggttttggatttcgccgtcaagcagatcaatgataaaacggatatttccattacctacgagcagcataaagaaggacgaaaaattgtaggttttacattctcaatcctacataaaatagggtcgaaagacatccctcttgaaaatcaatcggaactttttgccggaatgactgatttggaagccggaacgatacgggtcagggcggaagcatatatcgcttcgctcattgcaaaaggtcagaacgtgactaaagcccataggctgaatattctgaaaaaagccgtagaggaacgttggggatttgaagatgtggctaaagataatggggccaaaaatcctgaaaacaaaaatgcaaaagtcgttttaaacgaatgggaaaagatttctaatggcacacgttttaaggacaaggatggaacaatttgggttaaagattcaggtatgcttaggactgaagggacaaacaggtggatagccgattctcagattgccaaattatttcctatgttaactgtgatggttgaggaaggtatttaa

SEQ ID NO: 68832 - DNA, 279 bp, Neisseria meningitidis; identical to SEQ ID NO: 36597

SEQ ID NO: 68833 - DNA, 1227 bp, Neisseria meningitidis; identical to SEQ ID NO: 38564

SEQ ID NO: 68834 - DNA, 1104 bp, Neisseria meningitidis; identical to SEQ ID NO: 55122

SEQ ID NO: 68835 - DNA, 1881 bp, Neisseria meningitidis; identical to SEQ ID NO: 61607

SEQ ID NO: 68836 - DNA, 978 bp, Neisseria meningitidis; identical to SEQ ID NO: 55744

SEQ ID NO: 68837 - DNA, 234 bp, Neisseria meningitidis; identical to SEQ ID NO: 55793

SEQ ID NO: 68838 - DNA, 987 bp, Neisseria meningitidis; identical to SEQ ID NO: 37169

SEQ ID NO: 68839 - DNA, 1092 bp, Neisseria meningitidis; identical to SEQ ID NO: 55472

SEQ ID NO: 68840 - DNA, 1185 bp, Neisseria meningitidis
atgggtaaacatattcttttaggtgtaacgggcagtattgcggcgtataagtcttgcgagttggttcgtctgctgaaaaaacaggggcattcggttacggtggttatgagccgctcggcaactgaatttgtttctccgctgacttttcaggctttaagcggcaatcctgtcctgaccgacacgcacggcggcaacggttcaaacggtatggaacatatcaacctgacccggaatgcggatgtttttctgattgcgccggcaagtatgaataccgtggcaaaaatctgtaacggcgtggcagataacctactgaccagtctggcagccgcacggaaatgtccactcgccatcgctcccgcgatgaatgtggaaatgtggctcaaccctgccaaccaacggaatatcgcacaactggtttcagacggcattactgtctatatgccgggcttaggcgaacaggcttgcggagaaaatggtatgggaaggatgccggaacctgccgaattgctggatttgcttccggacttgtggacaccgaaaattttaaggggcaagaaaatcttgattaccgcaggtgcgacatttgaagccattgaccctgtcaggggcatcacaaatacctccagcggaaaaatgggggtagctttggcgcgggcgtgccgtgccgccggtgcggaagtcagcctgattcacggacagcttcaaaccgcgctgcctttcggcatatccgatacggttcaagccgtcagcgctgaagatatgcatcgcgcagtgcatcgtttgattgaaaagcaagatgcttttatttctgttgccgccgtctcagactataaggttaaaaacaagagtacgcaaaaattcaaaaaagataaaaatgccaaaccgttatccatcgaattggatgagaaccccgatattttggcttctattgcctcattgccaaacccgccgttctgcatcggttttgccgctgaaacggagaatgtaatggcatatgcacgagaaaaacgtattaagaaaaaaataccggtgatagttgccaatgatgtttcaatcgcgatgggcaaaccgaccaaccggattaccattatcggggacgacggggaactatcttttcccgaaacaagtaaagatgaagcggcgatgcagattgttgaaaggcttgccgtatatttgaacaaataa

SEQ ID NO: 68841 - DNA, 285 bp, Neisseria meningitidis; identical to SEQ ID NO: 47739

SEQ ID NO: 68842 - DNA, 558 bp, Neisseria meningitidis; identical to SEQ ID NO: 56097

SEQ ID NO: 68843 - DNA, 951 bp, Neisseria meningitidis; identical to SEQ ID NO: 54411

SEQ ID NO: 68844 - DNA, 1059 bp, Neisseria meningitidis; identical to SEQ ID NO: 42377

SEQ ID NO: 68845 - DNA, 963 bp, Neisseria meningitidis; identical to SEQ ID NO: 55174

SEQ ID NO: 68846 - DNA, 1614 bp, Neisseria meningitidis; identical to SEQ ID NO: 68569

SEQ ID NO: 68847 - DNA, 426 bp, Neisseria meningitidis; identical to SEQ ID NO: 42184

SEQ ID NO: 68848 - DNA, 765 bp, Neisseria meningitidis
atgccgaccgaagatattgaagagatatttatgagcgcaaacgtcagccgccttgttgttcaaaacctgcaaaaaagttttaaaaaacgccaagtcgttaaaagcttctccctcgaaatcgaaagcggcgaagtcatcggactgctcgggcccaacggtgcgggtaaaaccaccagcttctacatgatagtcggactcattgccgccgatgcgggcagcgtgatgctggacgggcaggaattgcgtcacctgcccatacacgaacgcgcccgcctcggtgtcggctacctgccgcaggaagcctcgatattccgcaaaatgaccgtcgaacaaaacatccgcgccatcttggaaatcagaaccaaagataaaaatcaaatcgacagggaaatcgaaaaactgctcgccgaccttaatatcggacacttgcgccgcagccccgcgccgtcgctgtccggcggcgaacgccgacgcgtcgaaatcgcccgcgtactcgccatgaaaccgcattttattttgttggacgaaccttttgccggcgtcgatccgattgccgtcatcgacatccagaaaatcatcggtttcctcaaatcgcgcggcatcggcgtactgattaccgaccacaacgtccgcgaaaccctcagcatctgcgaccgcgcctacatcatttcagacggtgcggtgctggcatcgggaaaacctgatgatttggtcggaaacgaacaggttcgttctgtttatctgggtaagaacttcaaatattga

SEQ ID NO: 68849 - DNA, 585 bp, Neisseria meningitidis; identical to SEQ ID NO: 45789

SEQ ID NO: 68850 - DNA, 1680 bp, Neisseria meningitidis; identical to SEQ ID NO: 61897

SEQ ID NO: 68851 - DNA, 417 bp, Neisseria meningitidis; identical to SEQ ID NO: 37115

SEQ ID NO: 68852 - DNA, 354 bp, Neisseria meningitidis; identical to SEQ ID NO: 61663

SEQ ID NO: 68853 - DNA, 876 bp, Neisseria meningitidis; identical to SEQ ID NO: 60932

SEQ ID NO: 68854 - DNA, 1230 bp, Neisseria meningitidis; identical to SEQ ID NO: 60732

SEQ ID NO: 68855 - DNA, 2178 bp, Neisseria meningitidis; identical to SEQ ID NO: 54291

SEQ ID NO: 68856 - DNA, 1464 bp, Neisseria meningitidis; identical to SEQ ID NO: 60977

SEQ ID NO: 68857 - DNA, 543 bp, Neisseria meningitidis
gtgcagagttggaaagcgcggcgggatttcaatattgtaaagcaggatttggatttttcctgtggggcggcttcggtggcgacgcttttgaacaatttttacgggcaaacgctgacggaagaagaagtgttgaaaaagctggataaggagcagatgcgcgcgtcgtttgaggatatgcggcgcattatgccagatttgggttttgaagcgaaaggctatgccctgtctttcgagcagctcgcacagttgaaaatccccgtcatcgtgtatctgaaataccgcaaggatgatcatttctcggtattgcgcgggatagacggcaatacggttttgcttgccgacccgtcgctggggcatgtttcaatgagcagggcgcagtttttggatgcttggcaaacccgtgagggaaatttggcaggtaagattttggcggtcgtgccgaaaaaagccgagacaatttcaaataaattgtttttcacacatcatcccaagcggcagacagagtttgcagtcggacaaatcaggcaagcacgtgcagagtaa

SEQ ID NO: 68858 - DNA, 1677 bp, Neisseria meningitidis; identical to SEQ ID NO: 60812

SEQ ID NO: 68859 - DNA, 348 bp, Neisseria meningitidis; identical to SEQ ID NO: 38212

SEQ ID NO: 68860 - DNA, 810 bp, Neisseria meningitidis; identical to SEQ ID NO: 54299

SEQ ID NO: 68861 - DNA, 468 bp, Neisseria meningitidis; identical to SEQ ID NO: 54622

SEQ ID NO: 68862 - DNA, 615 bp, Neisseria meningitidis; identical to SEQ ID NO: 36682

SEQ ID NO: 68863 - DNA, 3309 bp, Neisseria meningitidis
atgaatgagggtgaagttgttttaacaccagaacaaatccaaaccttgtatggttatgcttctcgtggcgatacctatggcggttggcgttatttggctaatttgggtgaccgttatgcggataatgctgccgcaattgtcggtaaggatgcaaacttaaatggtttgaatttatggatgaaaaaaggggtggaaaacctatgggatgatacggtcggtaaaaagacccgtttagagaaatttgatcgggttgcattgcaacatttcagccaatatgtagatctaattaatgaaaataatggtagattacctaacactagtgaaattgagagaagttactataaagccgttacctatcatggcgtttcttctagtgcagctattgatttagttattaatcgttcacttccggatatggcggatggttattgggcattaggtttggggatagaagccgaacgtatccacaatgagcaagcagtaaataatccgaacggtagcgaatcggataatagaaagcagttaatatctgctttagataaaggatttgatggatcttttaaagagaagcattttacttttttacaatctgtgataatggatgtaacaaagttaggtgttgaatatacaatagatggttggcaaaaaattggaggttggggtaatgggataatcaatgatttatataaaagtgttgcaaaaagagagtggactggaatatttgagatcgttaataataacatcaagcaatttagagatctgttcccaaatccggaaggctggatcgatgatggtcaccaatgtttcgctccttgggttaaagaaactaaaaaacgcaatggcaaatatcatgtctacgaccccctcgccctagacctagacggcgacggcatagaaacagtcgccgccaaaggcttttcaggcagcctcttcgaccataacggcaacggcatccgcaccgccactggctgggtttctgccgatgacggtttactcgtccgcgatttgaacggcaacggcatcatcgacaacggcgcggaactcttcggcgacaacaccaaactggcagacggttcttttgccaaacacggctacgcagctttggccgaattggattcaaacggcgacaacatcatcaacgcggcagacgccgcattccaatccctgcgtgtatggcaggatctcaaccaggacggcatttcccaaaccaacgaactccgcacccttgaagaattgggtattcaatctttggatctcgcctataaagatgtaaataaaaatctcggtaacggtaacactttggctcagcaaggcagctacaccaaaacaaacggtacaaccgcaaaaatgggggatttacttttagcagccgacaacctgcacagccgcttcaaagacaaagtggaactcactgccgaacaggcaaaagccgccaatcttgcgggcattggtcgtctgcgcgatttgcgcgaagctgccgcattgtccggcgatttggccaatatgctgaaagcttattctgccgccgaaactaaagaagcacagttggcattgttagataatttgattcacaaatgggcggaaaccgattcgaactggggcaaaaaatcgccaatgcgactttcaaccgattggacgcaaacggctaatgaaggtattgcactgacaccatcccaagtagcacaactaaaaaagaacgctttagtttccctttctgataaagctaaagcaactattgacgccgcccgcgaccgcattgccgtgcttgatgcctacacggggcaggattccaacacactctattacatgagcgaggaagatgcgcttaatatcgtcaaagtaaccaacgatacatacgaccatctcgccaaaaacatctaccaaaacctgttattccaaacccgtttgcagccatatttgaatcaaatcagtttcaaaatggaaaatgatacgttcactttggattttagtggtcttgttcaagcatttaaccatgtcaaagaaactaatccgcaaaaagcttttgtggatttggccgagatgcttgcatatggcgaacttcgttcttggtatgaaggccgaagactaatggccgattatgtggaggaggcaaaaaaagcaggtaaatttgaagattaccagaaagtgttgggtcaggagaccgttgcattattagctaaaacatcgggtacgcaagcagatgatatcctgcaaaatgtaggctttggtcataataaaaatgtttctttatatggtaatgacggcaacgacactctgatcggcggtgcaggcaatgattacttggagggcggcagcggttcggatacttatgtcttcggcaaaggcttcggtcaggatacggtctataattacgactacgctaccggacgcaaagacatcatccgctttaccgacggtattacagccgatatgctgacttttacccgagagggcaaccatcttcttatcaaggcaaaagacggcagtggacaagtgactgttcagtcctatttctagaacgatggctcaggtgcttaccgtatcgatgagattcatttcgataacggcaaagtactggatgttgccactgtcaaaaaactggtacagcaatccaccgacggttcggacagattgtatgcctaccaatccggaagtaccttaaatggcggattgggcgatgactatctgtacggtgccgacgggaatgacctgctgaatggtgatgcaggcaacgacagtatctacagtggcaatggcaatgatacgctcaatggaggagaaggcaacgacgccctgtacggctataatggtaacgatgcactgaatggtggcgaaggcaatgatcatttgaacggcgaagacggtaacgacactctgatcggcggtgccggtaatgattacttggagggcggcagcggttcggatacttatgtcttcggcgaaggcttcggtcaggatacggtctataattaccatgtggataaaaactctgacactatgcactttaaaggatttaaagcagcagatgttcattttatccgttccggaagtgatttggtgcttagcgcttctgaacaagacaacgtacgtatttccggattcttctatggtgaaaaccatcgtgtagatacatttgtctttgatgatgcagctatcagtaatccagattttgccaagtatattaatgctggcaataatttggtacagtctatgtctgtgttcggttctaatactgctgcgacaggaggaaatgtggatgccaatatacaatccgtacagcagccgttattggtaacgccatctgcataa

SEQ ID NO: 68864 - DNA, 768 bp, Neisseria meningitidis; identical to SEQ ID NO: 61061

SEQ ID NO: 68865 - DNA, 708 bp, Neisseria meningitidis
atggaaaaaatgagttttgaaatttaccgttacaacccggacgttgatgccaaaccttatatgcagcgttacgagttggaattggaaccaaccgacgttaaacttttggacgctttagtgcgcctgaaagcacaagatgatacattgtctttccgccgttcctgccgcgaaggcatttgcggatcggacggtatgaacatcaacggcaaaaacggtttggcgtgtctgaccgatctgcgtggcttgaaacagccggttaaaattcgtcctctgccaggtctgcctgttatccgcgacctgattgtggatatgacccagttcttcaaacaataccattccgtcaaaccttatgttgtcaacgataatccgattgatgcggacaaagagcgtctgcaaactcaggaagagcgtaaagagttggacggtttgtacgagtgtattttgtgcgcctgctgttcgactgcctgcccgtcattttggtggaaccctgataaattcgtcggtccgtccggtttgctgaatgcttaccgtttcattgcggacagccgtgataccatcactaatgagcgtttggatgatctgaacgacccataccgtttgttccgctgccacaccattatgaactgtgtggacgtatgccccaaacacttgaatccgacccgagccatcggtaagattaaagagattatgttgaagcgggccgtttaa

SEQ ID NO: 68866 - DNA, 1350 bp, Neisseria meningitidis; identical to SEQ ID NO: 60434

SEQ ID NO: 68867 - DNA, 1224 bp, Neisseria meningitidis; identical to SEQ ID NO: 55261

SEQ ID NO: 68868 - DNA, 297 bp, Neisseria meningitidis; identical to SEQ ID NO: 46812

SEQ ID NO: 68869 - DNA, 318 bp, Neisseria meningitidis; identical to SEQ ID NO: 46236

SEQ ID NO: 68870 - DNA, 999 bp, Neisseria meningitidis; identical to SEQ ID NO: 60641

SEQ ID NO: 68871 - DNA, 246 bp, Neisseria meningitidis; identical to SEQ ID NO: 59399

SEQ ID NO: 68872 - DNA, 2361 bp, Neisseria meningitidis
atgctccctatcgccgcgctggtcggcagtattttcggcaatccggtcttggcagcagatgaagctgcaactgaaaccacacccgttaaggcagagataaaagcagtgcgcgttaaaggtcagcgcaatgcgcctgcggctgtggaacgcgtcaaccttaaccgtatcaaacaagaaatgatacgcgacaataaagacttggtgcgctattccaccgatgtcggcttgagcgacagcggccgccatcaaaaaggctttgctgttcgcggcgtggaaggcaaccgtgtcggcgtgagcatagacggtgtaaacctgcctgattctgaagaaaactcgctgtacgcccgttatggcaacttcaacagctcgcgtttgtctatcgaccccgaactcgtgcgcaacatcgaaatcgtgaagggcgcagactctttcaataccggcagtggtgcattgggcggcggtgtgaattaccaaacgctgcaaggccgtgatttgctgttggacgacaggcaattcggcgtgatgatgaaaaacggttacagcacgcgtaaccgtgaatggacaaatactctcggtttcggtgtgagtaacgaccgcgtggatgctgctttgctgtattcgcaacgtcgcggtcatgaaaccgaaagcgcgggaaaccgaggctatgctgtggaaggggaaggcagtggcgcgaatatccgtggttcggcacgcggtatccctgattcgtccaaacacaaataccacagctttttgggtaagattgcttaccaaattaacgataaccaccgcatcggcgcatcgcttaacggccagcagggacataattacacggttgaagagtcttataacctgaccgcttcttcctggcgcgaagccgatgacgtaaacagacggcgcaatgccaacctcttttacgaatggatgcctgattcaaattggttgtcgtctttgaaggcggacttcgattatcagaaaaccaaagtggcggcggttaacaacaaaggctcgttcccgatggattattccacctggacgcgcaactataatcagaaggatttggacgaaatatacaaccgcagcatggacacccgattcaaacgttttactttgcgtttggacagccatccgttgcaactcgggggggggcgacaccgcctgtcgtttaaaactttcgtcagccgccgtgattttgaaaacctaaaccgcgacgattattacttcagcggccgtgttgttcgaaccaccagcagtatccagcatccggtgaaaaccaccaactacggtttctcactgtctgaccaaattcaatggaacgacgtgttcagtagccgcgcaggtatccgttacgaccacaccaaaatgacgcctcaggaattgaatgccgagtgtcatgcttgtgacaaaacaccacctgcagccaacacttataaaggctggagcggttttgtcggcttggcggcgcaactgaatcaggcttggcatgtcggttacgacattacttccggctaccgcgtccccaatgcgtccgaagtgtatttcacctacaaccacggttcgggtaattggctgcctaatcccaacctgaaagccgagcgcagcaccacccacaccctgtctctgcaaggccgcagcgaaaaaggcatgctggatgccaacctgtatcaaagcaattaccgcaatttcctgtctgaagagcagaagctgaccaccagcggcactcccggctgtactgaggaaaatgcttactacggtatatgcagcgacccctacaaagaaaaactggattggcagatgaaaaatatcgacaaggccagaatccgcggtatcgagctgacaggccgtctgaatgtggacaaagtagcgtcttttgttcctgagggttggaaactgttcggctcgctgggttatgcgaaaagcaaactgtcgggcgacaacagcctgctgtccacacagccgctgaaagtgattgccggtatcgactatgaaagtccgagcgaaaaatggggcgtattctcccgcctgacctatctgggcgcgaaaaaggccaaagatgcgcagtacaccgtttatgaaaacaagggctggggtacgcctttgcagaaaaaggtaaaagattacccgtggctgaacaagtcggcttatgtgtttgatatgtacggcttctacaaaccggctaaaaacctgactttgcgtgcaggcgtatataatgtgttcaaccgcaaatacaccacttgggattccctgcgcggcctgtatagctacagcaccaccaactcggtcgaccgcgatggcaaaggcttagaccgctaccgcgccccaagccgtaattacgccgtatcgctggaatggaagttttaa

SEQ ID NO: 68873 - DNA, 1113 bp, Neisseria meningitidis
atgagcaccttcttccagcaaaccgcccaagccatgattgctaaacacatcgaccgtttcccgctattgaagttggaccaggtaattgattggcagccgatcgaacagtacctgaatcgtcaaagaacccgttaccttagagaccaccgcggccgtcccgcctatcccctgttgtccatgttcaaagccgtcctgctcggacaatggcacagcctctccgatcccgaactcgaacacagcctcattacccgcatcgatttcaacctgttttgccgttttgacgaactgagcatccccgattacagcaccttatgccgctaccgcaactggttggcgcaagacaacaccctgtccgaattattggaactgatcaaccgccaactgaccgaaaaaggcttaaaagtagagaaagcatccgccgccgtcattgatgccaccattattcagactgccggcagcaaacagcgccaggccatagaagtcgacgaggaaggacaagtcagcggtcaaaccacactgagtaaggacaaaaatgcccgttggacaaagaaaaacggcctctacaaactcggttacaaacaacatacccgtaccgatgcggaaggctatatcgagaaactgcacatcacccccgccaatgcccatgagtgcaaacacctgtcgcctttgctggaaggactgcccaaaggtacgaccgtctatgccgacaaaggctatgacagtgcggaaaaccggcaacatctggaagaacatcagttgcaggacggcattatgcgcaaagcctgccgcaaccgtccgctgacggaaacgcaaaccaaacgcaaccggtatttgtcgaagacccgttatagtggattaaatttaaatcaggacaaggcgacgaagccgcagacagtacaaatagtacggcaaggcgaggcaacgccgtactggtttaaatttaatccactatatgtggtcgaacagagcttcggtacgctgcaccgtaaattccgctatgcgcgggcagcctattttggtctgctcaaagtgagtgcgcaaagccatctgaaggcgatgtgtttgaacctgttgaaagccgccaacaagctaagtgcgcccgctgccgcctaa

SEQ ID NO: 68874 - DNA, 303 bp, Neisseria meningitidis; identical to SEQ ID NO: 50054

SEQ ID NO: 68875 - DNA, 432 bp, Neisseria meningitidis; identical to SEQ ID NO: 62356

SEQ ID NO: 68876 - DNA, 516 bp, Neisseria meningitidis; identical to SEQ ID NO: 55543

SEQ ID NO: 68877 - DNA, 180 bp, Neisseria meningitidis; identical to SEQ ID NO: 61507

SEQ ID NO: 68878 - DNA, 702 bp, Neisseria meningitidis; identical to SEQ ID NO: 61083

SEQ ID NO: 68879 - DNA, 471 bp, Neisseria meningitidis; identical to SEQ ID NO: 55436

SEQ ID NO: 68880 - DNA, 288 bp, Neisseria meningitidis; identical to SEQ ID NO: 36767

SEQ ID NO: 68881 - DNA, 651 bp, Neisseria meningitidis; identical to SEQ ID NO: 43953

SEQ ID NO: 68882 - DNA, 1014 bp, Neisseria meningitidis; identical to SEQ ID NO: 60939

SEQ ID NO: 68883 - DNA, 297 bp, Neisseria meningitidis; identical to SEQ ID NO: 37913

SEQ ID NO: 68884 - DNA, 492 bp, Neisseria meningitidis; identical to SEQ ID NO: 62217

SEQ ID NO: 68885 - DNA, 810 bp, Neisseria meningitidis; identical to SEQ ID NO: 54624

SEQ ID NO: 68886 - DNA, 723 bp, Neisseria meningitidis; identical to SEQ ID NO: 54233

SEQ ID NO: 68887 - DNA, 804 bp, Neisseria meningitidis; identical to SEQ ID NO: 43212

SEQ ID NO: 68888 - DNA, 1629 bp, Neisseria meningitidis
atgatttctaccaacggcatcaccatgcagttcggcgcgaagccgctatttgaaaacgtatccgtcaaattcggcgaaggcagccgctacggtttgatcggcgccaacggctcaggcaaatccaccttcatgaaaatcctcggcggcgatttggaacagaccgccggtgaagtcgcaattgaaaacggcgtgcgtttgggtaaattgcgccaagaccagtttgcctacgaagacatgcgcgtgctggacgtggtgatgatggggcataccgaaatgtgggcggcgatgaccgaacgtgatgcgatttacgccaatcccgaagccaccgaagacgactacatgaaagccgccgaactggaagccaagttcgccgaatacgacggctacaccgccgaagcgcgtgccgccgaactgttgagcggcgtgggcatttccgaagatttgcacaatgcgaaaatggcggaagtcgccccgggcttcaaactgcgcgtattgctggcgcaagccctgttctccaagccggatgtgctgttgcttgacgaaccgaccaataacttggacatcaacaccatccgctggctggaaggcgtgttgaaccaatacgactccaccatgatcatcatctcgcacgaccgccactttttgaacgaagtctgcacccacatggcggatttggactacaacaccatcaccatctatcctggcaactacgacgactacatgctcgcttccgcccaatcgcgtgagcgcgccctgaaagacaacgccaaagccaaagagaaactgcaagagctgcaagagttcgtcgcacgcttctctgccaacaaatccaaagcccgtcaggcaaccagccgtctgaaacaggccgacaaaatcaaatcggagatggtcgaagtcaaaccttccacccgtcaaaacccgtatatccgttttgaagccgatgaaaaagccaagctgcaccgtcaggctgtggaagttgaaaaactggcgaaacgctttgaaacccagttgtttaaaaacctgaacttcatccttgaagcgggacaacgcctcgccatcatcggcccgaacggcgcgggcaaatccaccctgctgaaactcttggccggcgcgtacaaccccgaatattcagacggcctgttaccggacgaaggcagcatcaaatgggcggaaaaagccagtgtcggctactatccgcaagaccatgaaaacgacttcgacgtcgatatggatttgagcgaatggatgcgccaatgggggcaggaaggcgacgacgaacaagtcatccgcggcactttggggcgtttgctcttcggcagtaacgatgtcgtgaaaaaagtgaaggttctctccggtggtgaaaaaggccgtatgctttacggcaaactgttgctgttgaaacccaatgtcttagtcatggatgaaccgaccaaccacatggacatggaaagcatcgaatccttgaacatggcgctggaaaaatacaacggcacgctgattttcgtctcgcatgaccgtcagtttgtatcttcattggctacccaaatcatcgaattggacggtaaaggcggatatgaacactacttgggcgattacgaaagttacttggagaaaaaaggcgtagcataa

SEQ ID NO: 68889 - DNA, 876 bp, Neisseria meningitidis; identical to SEQ ID NO: 54946

SEQ ID NO: 68890 - DNA, 1542 bp, Neisseria meningitidis
atgaaaatcggcatcccacgcgagtcattatccggcgaaacccgcgtcgcctgtacgcccgccaccgtcgccctgctgggcaaactgggctttgaaaccgttgtcgaaagcggtgcaggtttggcggcaagtttggacgatgccgcttaccaaacagcaggcgcaaccgttgccgacaaagcggcggtttgggcctgccctttgatttataaggttaacgcgccgtccgaaggcgagctgccgcttttgaacgaaggtcaaaccatcgtcagcttcctgtggccgcgccaaaacgaggctttggtcgaagccttgcgcgccaagaaagtcaatgcgctggcgatggacatggtgccccgtatttcccgcgcgcaggctttggacgctttgtcttcgatggcaaacatcagcggctaccgcgccgtaattgaagccgccaacgccttcggccgtttcttcaccggtcaaatcaccgccgccggcaaagtgccgcccgcgcaggttttggtgattggtgcaggtgtggcaggtttggcggcgatcggtacggcaaactcgctcggcgcagtggtacgcgcgttcgatacccgcttggaagtggcggaacaaatcgaatcgatgggcggcaagttcctgaaactcgacttcccacaagaatcgggcggcagcggagacggctacgccaaagtgatgagcgacgaatttatcgcagccgagatgaagctctttgccgagcaggcgaaagaagtggacatcatcatcaccaccgccgccattccgggcaaacccgcgcccaagctgattaccaaagaaatggtggaaagcatgaaatccggctccgtcatcgtcgatttggcggcggcgacgggcggcaactgcgaactcacccgcccgggcgaattgtccgtaaccggcaacggcgtgaaaatcatcggctacaccgacatggcaaaccgccttgccggacagtcttcccagctttacgccaccaacttggtcaacctgaccaagctgttaagcccgaacaaagacggcgaaatcacgttggacttcgaagacgtgattatccgcaacatgaccgttacccacgacggcgaaatcaccttcccgcctccgccgattcaagtttccgcccagccgcagcaaacgccgtctgaaaaagccgcgcctgccgccaagcccgagccgaaacctgtttccctgtggaaaaaactcgcgcccgccgtcatcgccgccgtattggtgctgtgggtcggcgcggtcgcacccgcagcattcctgaaccactttatcgtgttcgtcctcgcctgcgtcatcgggtactacgtcgtttggaacgtcagccactcgctgcacacaccgctgatgtcggtaaccaacgccatctccggcatcatcgtcgtcggcgcgctgctgcaaatcagccaaggcaacggtttcgttaccctgcttgccttcatcgccatcctgattgccagcatcaatatcttcggcggcttcttcgtaacgcgccgcatgttgaatatgtttaagaaagggtaa

SEQ ID NO: 68891 - DNA, 399 bp, Neisseria meningitidis; identical to SEQ ID NO: 61712

SEQ ID NO: 68892 - DNA, 216 bp, Neisseria meningitidis; identical to SEQ ID NO: 42829

SEQ ID NO: 68893 - DNA, 1512 bp, Neisseria meningitidis; identical to SEQ ID NO: 44625

SEQ ID NO: 68894 - DNA, 855 bp, Neisseria meningitidis; identical to SEQ ID NO: 42323

SEQ ID NO: 68895 - DNA, 729 bp, Neisseria meningitidis; identical to SEQ ID NO: 48938

SEQ ID NO: 68896 - DNA, 1011 bp, Neisseria meningitidis; identical to SEQ ID NO: 61165

SEQ ID NO: 68897 - DNA, 1551 bp, Neisseria meningitidis
atgaaaaaacctttgatttcggttgcggcagcattgctcggcgttgctttgggcacgccttattatttgggtgtcaaagccgaagaaagcttgacgcagcagcaaaaaatattgcaggaaacgggcttcttgaccgtcgaatcgcaccaatatgagcgcggctggtttacctctatggaaacgacggtcatccgtctgaaacccgagttgctgaataatgcccaaaaatacctgccggataacctgaaaacagtgttggaacagccggttacgctggttaaccatatcacgcacggcccttttgccggcggatttggcacgcaggcgcacattgaaaccgagttcaaatacgcgcctgaaacggaaaaagttttggaacgcttttttgggaaacaagctccggtttcccttgccaataccgtttattttaacggcagcggtaaaatggaagtcagtgttcccgccttcgattatgaagagctgtcgggcatcaggctgcattgggaaggattgacgggaaaaacggtttatcaaaaaggtttcaaaagctaccgcaacagctatgatgcgcccttgttcaaaatcaagctggcagacaaaggcgatgccgcgtttgaaaaagcgcatttcgattcggaaacttcagacggcatcaatccgcttgctttgggcagcagcaatctgaccttggaaaaattctccctagaatggaaagagggtgtcgattacaacgtcaagttaaacgaactggtcaatcttgttaccgatttgcagattggcgcgtttatcaatcccaacggcagcatcgcaccttccaaaatcgaagtcggcaaactggctttttcaaccaagaccggggaatcaggctcatttatcaacagtgaagggcagttccgttttgacacgctggtgtacggcaatgaaaaatacggcccgctggacatccatatcgccgccgaacatctcgatgcttctgccttaaccgtattgaaacgtaagtttgcacaaatttccgccaaaaaaatgaccgaggaacaaatccgcaatgatttgattgccgccgtcaaaggcgaggcttccggactgttcaccaacaatcccgtattggacattaaaacttttcgtttcacacagccgtcgggaaaaatcgatgtgggtggaaaaatcatgtttaaagacatgaagaaggaagatttgaaccaattgggtttgatgctgaagaaaaccgaagccgacatcagaatgagtattccccaaaaaatgctggaagacttggcggtcagtcaggcaggcaatattttcagcgtcaatgccgaagatgaggcggaaggcagggcaagtcttgacgacatcaacgagaccttgcgcctgatggtggacagtacggttcagagtatggcaagggaaaaatatctgactttgaacggcgaccagattgatactgccatttctctgaaaaacaatcagttgaaattgaacggtaaaacgttgcaaaacgaaccggagccggattttgatgaaggcggtatggtttcagagccgcagcagtaa

SEQ ID NO: 68898 - DNA, 594 bp, Neisseria meningitidis; identical to SEQ ID NO: 61234

SEQ ID NO: 68899 - DNA, 624 bp, Neisseria meningitidis; identical to SEQ ID NO: 39191

SEQ ID NO: 68900 - DNA, 789 bp, Neisseria meningitidis; identical to SEQ ID NO: 64071

SEQ ID NO: 68901 - DNA, 372 bp, Neisseria meningitidis; identical to SEQ ID NO: 37474

SEQ ID NO: 68902 - DNA, 633 bp, Neisseria meningitidis; identical to SEQ ID NO: 41857

SEQ ID NO: 68903 - DNA, 516 bp, Neisseria meningitidis; identical to SEQ ID NO: 60750

SEQ ID NO: 68904 - DNA, 1245 bp, Neisseria meningitidis; identical to SEQ ID NO: 55921

SEQ ID NO: 68905 - DNA, 2007 bp, Neisseria meningitidis; identical to SEQ ID NO: 60441

SEQ ID NO: 68906 - DNA, 534 bp, Neisseria meningitidis; identical to SEQ ID NO: 61585

SEQ ID NO: 68907 - DNA, 366 bp, Neisseria meningitidis; identical to SEQ ID NO: 46768

SEQ ID NO: 68908 - DNA, 1503 bp, Neisseria meningitidis
atggcaaaagtactcatcgtacccgtatctgccggactggacgcctccgccgccgcacaagcctttgcaaaagcactggacgcacaaattttccaagccgttgacgcaaccgccgaaaccctgctcgcgcaaggcaaaagcgacgactggttcgacgcactggtcggcaaagttgccgcactcgatgccgccaacctcgtcatcgaaggcatcgcgcccgatgccgacaaaatctacctcgcaggcaaaaacgtcgaactggcattgtcccttgacgcggcagccgtcttcgccgtccgttccgacaacgccgatgccgacgaactggcaaatcggctgaaccttgccaaacagttcttcgccgccgcgccgggcgtattggaaggttttgtcgtggacggcgcggcagcctccgttgccgaagcggcagccgaaaaaaccggcctgaccttcttcggttcgagcgacgcgctgaaagacgtatccgtattggcaggccgcgaagcaaaacgcctgtcgccggcgcaattccgctacaacctgatcgacttcgcccgccaagccgacaaacgcatcgtcctgcctgagggcgcagaaccccgcaccgtccaagccgccgccatctgccacgaaaaaggcattgcccgctgcgtcctgcttgccaaacgcgaagaagtcgaagccgttgccaaagaacgcggcatcagcctgcccgactctttggaaatcatcgatcccgcctcattggtcgaacaatacgtcggaccgatgtgcgaactgcgcaaatccaaaggcctgacacccgaagacgcgcgcaagcaactgcaagacaccgtggtactcggtacgatgatgatggcgcaaaatgatgtggacggtttggtatccggtgcggttcacaccaccgccaacaccatccgccccgctttgcaactgattaaaaccgcaccgggcgcaagcctcgtgtccagcgtattctttatgctgctgcccaaccaagtcctcgtcttcggcgactgcgcggttaatccgaacccgaccgcgcaacagcttgccgacatcgccatccagtctgccgattccgcaaaagccttcggcatcgacccgaaagtggcgatgatttcctactccaccgtcaactccggcagcggccccgatgtcgataccgtcatcgaagcaaccaaacttgcccgggaaaaacgccccgacctcgccatcgacggcccgctgcaatatgatgcggcaaccgtgccgggcgtgggcaaatccaaagctccgggcagcccggtggcaggacaggcaaccgttttggtcttccccgacctgaacaccggcaactgcacctataaagccgtccaacgcagtgccaacgtcttaagcgtcggcccgctgctgcaaggcctgcgcaaaccggtcaacgacctgtcgcgcggcgcgctggtggaagacatcgtgttcaccatcgccctaactgccgttcaggcaaaacaaatggaaggctga

SEQ ID NO: 68909 - DNA, 783 bp, Neisseria meningitidis; identical to SEQ ID NO: 61199

SEQ ID NO: 68910 - DNA, 414 bp, Neisseria meningitidis; identical to SEQ ID NO: 45183

SEQ ID NO: 68911 - DNA, 1311 bp, Neisseria meningitidis; identical to SEQ ID NO: 39855

SEQ ID NO: 68912 - DNA, 777 bp, Neisseria meningitidis
atggctaagaaattcgataaagacagcttcagcggcacgctgattgtcgtgttggcggtcagcctgatttgttccatcatcgttgctggtgcggtcgtcggtttgaaacccatccaagagaaacaaaaactccaagacaaacaaggctatatcttgagcgtagccggtttgatggataaaaacaccgacattagcaaaacctttgccgagcgtatcgagcaacgtgttgtcgatttggcgaccggcgaatatgtcgctgatgcgcctaaagacttcagcgcacgcgttgccggcaaagaccctgcccaaagcatccaaatcaaacctgaagacgatttggcaggcatcaaaagccgtgccaaatacaccgaggtttatttggtaaaaggcgaagacggcaaaatcggccaaatcatcctgccgatgcacggcaacggtttgtggtcggtcatgtacggctttgtcgccatccaacccgacggcaacaccatcaacggcattacctactacgagcaaggcgaaaccccgggcttgggcggcgaaatcggcaatcctttgtggcagcaaaaattcgtcggcaaaaaactgtttgacggacaaggcaaactcgccctgcacgtcggcaaaggcgcgggttcggacaaagaacacggcgtagatgccctctccggtgcatcgctgacatccaaaggcgtgcaaggttcgttcgcctactggttcggcgaaaacggctatatcccctacctgaacaaattgaaatcagcaggagcgcaataa

SEQ ID NO: 68913 - DNA, 789 bp, Neisseria meningitidis
atgagcaccttctttcagcaaaccgcccaagccatgattgccaaacacatcggccgtttcccgctattgaagttggatcaggtaattgattggcagccgatcgaacagtacctgaatcgtcaaaaaacccgttacctcagagaccaccgcggtcgtcccgcctgtcccctgttgtccatgttcaaagccgtcctgctcggacaatggcacagcctctccgatcccgaactcgaacacagcctcatcacccgcatcgatttcaacctgttttgccgttttgacgaactaagcatccccgattacagcaccttatgccgttaccgcaaccggctggcgcaagacgacaccctgtccgaattgctcaaactgattaaccgacaactgaccgaaaaaggcttaaaagtagagaaagcatccgccgccgtcattgacgccaccattattcagaccgccggcagcaaacagcgtcaggccatagaagttgacgaagaaggacaaatcagcggtcaaaccacaccgagtaaggacagcgatgcccgttggataaagaaaaacggcctctacaaactcggttacaaacaacatacccgtaccgatgcagaaggctatatcgagaaactgcacattactcccgccaatgcccatgagtgcaaacacctgtcgccgttgttagaagggatagctgaaggtacgaccgtctatgccgacaaaggctatgacagtgcggaaaaccggcaacatctggaagaacatcagttgcaggacggcattatgcgcaaagccacctga

SEQ ID NO: 68914 - DNA, 483 bp, Neisseria meningitidis; identical to SEQ ID NO: 54785

SEQ ID NO: 68915 - DNA, 540 bp, Neisseria meningitidis; identical to SEQ ID NO: 61313

SEQ ID NO: 68916 - DNA, 273 bp, Neisseria meningitidis; identical to SEQ ID NO: 44810

SEQ ID NO: 68917 - DNA, 1977 bp, Neisseria meningitidis; identical to SEQ ID NO: 61733

SEQ ID NO: 68918 - DNA, 1446 bp, Neisseria meningitidis; identical to SEQ ID NO: 60656

SEQ ID NO: 68919 - DNA, 1635 bp, Neisseria meningitidis; identical to SEQ ID NO: 60629

SEQ ID NO: 68920 - DNA, 1380 bp, Neisseria meningitidis; identical to SEQ ID NO: 55627

SEQ ID NO: 68921 - DNA, 984 bp, Neisseria meningitidis; identical to SEQ ID NO: 62215

SEQ ID NO: 68922 - DNA, 369 bp, Neisseria meningitidis; identical to SEQ ID NO: 55712

SEQ ID NO: 68923 - DNA, 957 bp, Neisseria meningitidis; identical to SEQ ID NO: 55343

SEQ ID NO: 68924 - DNA, 699 bp, Neisseria meningitidis
gtgcaggcggatttagcttatgccgccgaacgcattacccacgattatccgaaagcaaccggtgcaaacaacacaagcacagtaagcgattatttcagaaacatccgtgcgcattccatccacccccgggtgtcggtcggctacgatttcggcgactggaggatagcggcagattatgccagttacagaaaatggaacaacaataaatattccgtaaacacaaaagaggtgggaagaaacaataacaataacattgacatctggaaagaactgaagacggaaaatcaggaaaacggcagcttccacgccgcttcttctctcggcttatccgccatttacgatttcaaactcaacgataaattcgataaattcaaaccctatatcggtgcgcgcgtcgcctacggacacgttaaacatcaggttcattcggtgagaaaagaaaccacgactgttttcagtaaaccaagtggtagcgttacaaagccaggcgagatcgtagaaactccgaccagcaaacctgcctatcacgaaagccacagtatcagcagcttgggtcttggtgtcatcgccggtgtcggtttcgacatcacgcccaagctgaccttggacaccggataccgttaccacaactggggacgcttggaaaacacccgattcaaaacccacgaagtctcattgggcatgcgctaccacttctga

SEQ ID NO: 68925 - DNA, 216 bp, Neisseria meningitidis; identical to SEQ ID NO: 42474

SEQ ID NO: 68926 - DNA, 2208 bp, Neisseria meningitidis; identical to SEQ ID NO: 55562

SEQ ID NO: 68927 - DNA, 2121 bp, Neisseria meningitidis; identical to SEQ ID NO: 55985

SEQ ID NO: 68928 - DNA, 738 bp, Neisseria meningitidis; identical to SEQ ID NO: 40223

SEQ ID NO: 68929 - DNA, 828 bp, Neisseria meningitidis; identical to SEQ ID NO: 54360

SEQ ID NO: 68930 - DNA, 1152 bp, Neisseria meningitidis; identical to SEQ ID NO: 60840

SEQ ID NO: 68931 - DNA, 3684 bp, Neisseria meningitidis; identical to SEQ ID NO: 61548

SEQ ID NO: 68932 - DNA, 474 bp, Neisseria meningitidis; identical to SEQ ID NO: 55126

SEQ ID NO: 68933 - DNA, 2889 bp, Neisseria meningitidis; identical to SEQ ID NO: 61582

SEQ ID NO: 68934 - DNA, 750 bp, Neisseria meningitidis; identical to SEQ ID NO: 54728

SEQ ID NO: 68935 - DNA, 795 bp, Neisseria meningitidis; identical to SEQ ID NO: 61661

SEQ ID NO: 68936 - DNA, 1845 bp, Neisseria meningitidis; identical to SEQ ID NO: 61395

SEQ ID NO: 68937 - DNA, 513 bp, Neisseria meningitidis; identical to SEQ ID NO: 37445

SEQ ID NO: 68938 - DNA, 231 bp, Neisseria meningitidis; identical to SEQ ID NO: 55669

SEQ ID NO: 68939 - DNA, 372 bp, Neisseria meningitidis; identical to SEQ ID NO: 41171

SEQ ID NO: 68940 - DNA, 339 bp, Neisseria meningitidis; identical to SEQ ID NO: 55496

SEQ ID NO: 68941 - DNA, 1113 bp, Neisseria meningitidis; identical to SEQ ID NO: 37030

SEQ ID NO: 68942 - DNA, 2364 bp, Neisseria meningitidis; identical to SEQ ID NO: 55339

SEQ ID NO: 68943 - DNA, 510 bp, Neisseria meningitidis
atgaaaaagaaactgctttcgggcatcaaatttgccgttcagacggcattggtgtttttattggtgtcgctgtttttggattgggtacgcaagcccgaagagccggccggtgcggcagggcggcctttgaccctgctgtcggggcagcggctgactttgggacagtttagccgggataaggcggttttggtgtatttttgggggagctggtgcggcgtgtgccgttatcagtcgccgataatcgatgatttggcggcggacggcgtgccggtcgtcggcgtggcggtacgttccggcagcgcgtccgaagtggcggcgtatatggcaaagcggggcttgggctttccgactgtcaacgatgaggacgggggtttggcaaggtcttggcggattgtcgcaacgccagccgtcgttttggtcaaaaatgggaaaatggttcactatacgacgggaatcagcagttattggggcttgcgcgcacgaatttttcaggcggatgttttcggttaa

SEQ ID NO: 68944 - DNA, 1677 bp, Neisseria meningitidis; identical to SEQ ID NO: 50911

SEQ ID NO: 68945 - DNA, 1236 bp, Neisseria meningitidis; identical to SEQ ID NO: 39525

SEQ ID NO: 68946 - DNA, 483 bp, Neisseria meningitidis; identical to SEQ ID NO: 42582

SEQ ID NO: 68947 - DNA, 612 bp, Neisseria meningitidis; identical to SEQ ID NO: 55369

SEQ ID NO: 68948 - DNA, 912 bp, Neisseria meningitidis; identical to SEQ ID NO: 54823

SEQ ID NO: 68949 - DNA, 852 bp, Neisseria meningitidis; identical to SEQ ID NO: 56082

SEQ ID NO: 68950 - DNA, 1032 bp, Neisseria meningitidis; identical to SEQ ID NO: 48687

SEQ ID NO: 68951 - DNA, 318 bp, Neisseria meningitidis; identical to SEQ ID NO: 54811

SEQ ID NO: 68952 - DNA, 1395 bp, Neisseria meningitidis; identical to SEQ ID NO: 55365

SEQ ID NO: 68953 - DNA, 486 bp, Neisseria meningitidis; identical to SEQ ID NO: 43447

SEQ ID NO: 68954 - DNA, 426 bp, Neisseria meningitidis; identical to SEQ ID NO: 54863

SEQ ID NO: 68955 - DNA, 477 bp, Neisseria meningitidis; identical to SEQ ID NO: 55204

SEQ ID NO: 68956 - DNA, 147 bp, Neisseria meningitidis; identical to SEQ ID NO: 42194

SEQ ID NO: 68957 - DNA, 1227 bp, Neisseria meningitidis; identical to SEQ ID NO: 61868

SEQ ID NO: 68958 - DNA, 336 bp, Neisseria meningitidis; identical to SEQ ID NO: 61488

SEQ ID NO: 68959 - DNA, 2292 bp, Neisseria meningitidis; identical to SEQ ID NO: 55594

SEQ ID NO: 68960 - DNA, 372 bp, Neisseria meningitidis; identical to SEQ ID NO: 39277

SEQ ID NO: 68961 - DNA, 501 bp, Neisseria meningitidis
atggcggatttgcagaaaacttttcaaacttcgttccgtgatgcgatggcatcttgtgcggcaggcgttcatgtcatcacgacagacggtgcggcagggcgttacggcattacaatgacggcggttacaccggtaacggacgagcctccgaccgtgatgctgtgcatcaaccggagtgcgcgaatcattccgatcctgtcggaaaacggcagcctgtgcatcaatacgttggcagacgaacatcaggatgttgccgaacattttgccggattgaccggcctgtcgcccgaagagcggtttgcctaccatatttggcatcgcggcaaaacgggacaacttgaaatagaaggcgcgttggcgcacctgcacgggcatattgtcggcaaacatgaaatcggcacgcattttgtgttttacgtcaggctcgacgaaattaaaaactgcgggtgcaaacgtcccgcgctgctgtatttcagacggcagtttagatttttagactga

SEQ ID NO: 68962 - DNA, 411 bp, Neisseria meningitidis
ttggctgaaggtcaaaaatcagccgttaccgagtattacctgaatcacggcgaatggcccgccaacaacagttctgccggcgtggcaacctccgccgacatcaaaggcaaatatgttaaaagcgttgaagtcaaaaacggcgtcgttaccgcccaaatggcttcaagcaacgtaaacaacgaaatcaaaggcaaaaaactctccctgtgggccaagcgtcaagccggttcggtaaaatggttctgcggacagccggttacgcgcgacgccaccgccagcgccgacgccgtcaaagccgacaccgccaccaccaagaagatcgacaccaagcacctgccgtcaacctgccgcgacgcagcatctgccgtttgcatagaaacaccacctacggctttctataaaaatacctaa

SEQ ID NO: 68963 - DNA, 381 bp, Neisseria meningitidis
ttggctgaaggtcaaaaatcagccgttaccgagtattacctgaatcacggcatatggcccgccaacaacaattctgccggcgtggcaacctccaccgacatcaaaggcaaatatgttcaaagcgttgaagtcaaaaacggcgtcgttaccgccacaatggcttcaagcaacgtaaacaacgaaatcaaaggcaaaaaactctccctgtgggccaagcgtcaaaacggttcggtaaaatggttctgcggacagccggttgagcgcaccgcccccaccaccaccaacgacgacgtcaaagccgacaccgccgccaacggcaagcagatcgacaccaagcacctgccgtcaacagcatcgacaagaaaatcgacaccaaactag

SEQ ID NO: 68964 - DNA, 825 bp, Neisseria meningitidis
gtgaaccgaactgccttctgctgcttttctctgaccgccgccctgattctgaccgcctgcagcagcggaggcggcggtgtcgccgccgacatcggcgcggggcttgccgatgcactaaccgcaccgctcgaccataaagacaaaagtttgcagtctttgacgctggatcagtccgtcaggaaaaacgagaaactgaagctggcggcacaaggtgcggaaaaaacttatggaaacggcgacagccttaatacgggcaaattgaagaacgacaaggtcagccgtttcgactttatccgtcaaatcgaagtggacgggcagctcattaccttggagagcggagagttccaagtgtacaaacaaagccattccgccttaaccgcccttcagaccgagcaagaacaagatccagagcattccgggaagatggttgcgaaacgccggttcaaaatcggcgacatagcgggcgaacatacatcttttgacaagcttcccaaagacgtcatggcgacatatcgcgggacggcgttcggttcagacgatgccggcggaaaactgacctatactatagattttgctgccaaacagggacacggcaaaatcgaacatttgaaatcgcccgaactcaatgtcgagcttgccaccgcctatatcaagccggatgaaaaacaccatgccgtcatcagcggttccgtcctttacaatcaagacgagaaaggcagttactccctcggtatctttggcgggcaagcccaggaagttgccggcagcgcggaagtggaaaccgcaaacggcatacaccatatcggtcttgccgccaagcaataa

SEQ ID NO: 68965 - DNA, 672 bp, Neisseria meningitidis; identical to SEQ ID NO: 42198

SEQ ID NO: 68966 - DNA, 552 bp, Neisseria meningitidis; identical to SEQ ID NO: 60291

SEQ ID NO: 68967 - DNA, 534 bp, Neisseria meningitidis; identical to SEQ ID NO: 55408

SEQ ID NO: 68968 - DNA, 1110 bp, Neisseria meningitidis; identical to SEQ ID NO: 55096

SEQ ID NO: 68969 - DNA, 966 bp, Neisseria meningitidis; identical to SEQ ID NO: 60867

SEQ ID NO: 68970 - DNA, 1254 bp, Neisseria meningitidis; identical to SEQ ID NO: 62053

SEQ ID NO: 68971 - DNA, 654 bp, Neisseria meningitidis
atgaagataacgcactgcaaattaaagaaaaaagtacagaaagaactgctccgtttttttgtgctggaagttaccgcccgttctgccgccgatattttgggtatccatcccaattcggcagcactgttctaccgtaaaatccgcacggttatcaaccatcatttggccctggctgccgatgaggtttttgagggccctgtcgagccggacgaaagcgatttcggcggacggcgtaaaggcagacgtggtcgcggtgcggcaggaaaagtggttgtcttcggcattctgaaacgtaacggacgggtctataccgttgtcgtagataatgccaagtccgatactttaatgcctgttatcaaacagaaaatcatgccggacagtattgtttataccgatagtctgagcagctgcgacaagttggacgtgagcggttttatccattaccgcatcaaccattccaaggaatttgcagaccgtcagaaccacattaacggcattgagaatttttggaatcaggcaaaacgcgtcttgcgaaaatacaacggaatcgatcgtaaatctttcccgctgtgcttgaaagaatgcgaatttcgatttaacttcggcacaccgtctcaacagcttaaaatcctgcgggattggtgtggaatttag

SEQ ID NO: 68972 - DNA, 252 bp, Neisseria meningitidis; identical to SEQ ID NO: 41525

SEQ ID NO: 68973 - DNA, 165 bp, Neisseria meningitidis; identical to SEQ ID NO: 54463

SEQ ID NO: 68974 - DNA, 324 bp, Neisseria meningitidis; identical to SEQ ID NO: 59444

SEQ ID NO: 68975 - DNA, 687 bp, Neisseria meningitidis; identical to SEQ ID NO: 39157

SEQ ID NO: 68976 - DNA, 1029 bp, Neisseria meningitidis
atggatttaagtatcgtagttcccatttataatgtcgagagttatttggaagcgtgtctaaattccatagaacctatattaagtaatgaaaatgtcgaacttatccttgtgaatgacgggtcaaaagacggaagtgaagatatatgttataaatatatagataaaacaacaaacaacaaacaacaaacaacaaacaacaaacaacaaacaacaaacaacaccagataccgaacaccaaacatcaaatatatatatcaggataaccaagggacggcagaagctaggaataccggaataaaaaattcaaacggaaaatatatagtctttattgattcggatgattttattaattgtcaggtcttgctggattttcttagtaaagatgatattgatatgccggatgtggtttttttaaatgcggttaaatatgataagggaagtgtttcacattttggcgaagattatcagcctgaaaaaatactcaagcaatccaaagtcgaagttttgaaaggattatgccgatttagaaaatttccgggttcggcgtgtaataagattataaaaagggaattgattatcaaagaaaaactgttttttgaaaaagaggtttatgccgaagatatcgaatggtcaatgagattatttaatgcggcaacaactttttcttatttggacggttgttattactattatcggcagggaagaaaagattctaaaacaggaactgtttcggaaaaaagtataaagtcattattatatattttggagaaaaatgcggaaatggaatttgatagggatatatcaagttatctttattcttttctttcctacgaatatctcgttttgctttttatcatgacgagtaaaaatatagagtgtgatgctgatataaaaagaagggcgtatcatttaaggtttatgctgttaaagtccaataaattgatatataagctgatattcccgataatcacattattcggggtcgatattacaggcaggattttaaaagcaatcagggggaatatttaa

SEQ ID NO: 68977 - DNA, 1017 bp, Neisseria meningitidis; identical to SEQ ID NO: 54397

SEQ ID NO: 68978 - DNA, 807 bp, Neisseria meningitidis; identical to SEQ ID NO: 54619

SEQ ID NO: 68979 - DNA, 213 bp, Neisseria meningitidis; identical to SEQ ID NO: 36410

SEQ ID NO: 68980 - DNA, 324 bp, Neisseria meningitidis; identical to SEQ ID NO: 56020

SEQ ID NO: 68981 - DNA, 1455 bp, Neisseria meningitidis; identical to SEQ ID NO: 61601

SEQ ID NO: 68982 - DNA, 645 bp, Neisseria meningitidis; identical to SEQ ID NO: 54864

SEQ ID NO: 68983 - DNA, 1494 bp, Neisseria meningitidis; identical to SEQ ID NO: 60605

SEQ ID NO: 68984 - DNA, 1305 bp, Neisseria meningitidis; identical to SEQ ID NO: 44037

SEQ ID NO: 68985 - DNA, 642 bp, Neisseria meningitidis
atgaccgatttccgccaagatttccttaaattctccctcgcccaaaatgttttgaaattcggcgaattcaccaccaaagccggacggcggtcgccctatttcttcaatgccggtctctttaacgacggcttgtccacgctgcaactggcaaaattctatgcacaatccatcattgaaagcggcatccgattcgatatgctgttcggtcccgcctacaaaggtattattttggcggcggcaaccgcgatgatgctggcggaaaaaggcgtaaacgtcccgtttgcctacaaccgcaaagaagccaaagaccacggcgaaggcggcgtgttggtcggtgcgccgcttaaagggcgcgtgctgattatcgacgacgtgatttctgccggcacatccgtacgcgaatcgatcaagctgattgaagcggagggcgcaacccccgccggcgtcgccatcgcgctcgaccgcatggaaaaaggcaccggcgaattgagcgcggttcaggaagtggaaaaacaatacggtctgcccgtcgcccccatcgccagcctgaacgatttgttcatcctgttgcaaaacaaccccgaattcggacagttcctcgaacccgtccgagcctaccgtcggcagtacggcgtagaataa

SEQ ID NO: 68986 - DNA, 1596 bp, Neisseria meningitidis
atgtcccaagaaatcctcgaccaagtgcgccgccgccgcacgtttgccatcatctcccaccccgacgcgggtaaaaccacgctgaccgaaaagctgttgctgttttcgggcgcgattcagagcgcgggtacggtaaaaggcaaaaaaaccggcaaattcgccacctccgactggatggacatcgagaagcagcgcggcatttccgtggcatcaagcgtgatgcagttcgactacaaagaccacaccgtcaacctcttggacacgccgggacaccaagacttctccgaagacacctaccgcgttctgaccgccgtggacagcgccttgatggtcatcgacgcggcaaaaggtgtggaagcgcaaaccatcaaactcttgaacgtctgccgcctgcgcaatacgccgattgtcacgttcatgaacaaatacgaccgcgaagtgcgcgattctttggagttgctggacgaagtggaaaacatcctgcaaatccgctgcgcgcccgtaacctggccgatcggcatgggcaaaaacttcaaaggcgtgtaccacatcctgaacgacgaaatctatctctttgaagccggtggcgaacgtctgccgcacgagttcgacatcatcaaaggcatcgacaatcccgaattggaacaacgctttccattggaaatccagcagttgcgcgacgaaatcgaattggtgcaggcggcttccaacgagtttaatctcgacgaattcctcgccggcgaactcacgcccgtattcttcggctctgcgattaacaacttcggtattcaggaaatcctcaattcattgattgactgggcgcccgcgccgaaaccgcgcgacgcgaccgtacgtatggtcaagccggacgagccgaaattctccggatttatctttaaaatccaagccaatatggatccgaaacaccgcgaccgcatcgccttcttgcgcgtctgctccggcaaattcgagcgcggtatgaagatgaaacacctgcgcatcaaccgcgaaatcgctgcctccagcgtggtaacctttatgtcgcacgaccgcgagctggtggaagaagcctacgccggcgacatcatcggcatcccgaaccacggcaacatccaaatcggcgacagcttctccgaaggcgaacaactggcgtttaccggcatcccattctttgcgcccgaactgttccgcagcgtccgcatcaaaaacccgctgaaaatcaagcaactgcaaaaaggtttgcaacagcttggcgaagaaggcgcggtacaggtattcaaaccgatgagcggcgcggatttgattttgggcgcggtcggcgtgttgcagtttgaagtcgttacctcgcggctggccaacgaatacggcgtagaagccgtgttcgacagcgcatccatctggtcggcgcgctgggtatcgtgcgacgacaagaaaaaactggcggagtttgaaaaagccaacgcgggcaacctcgccatcgacgcgggcggcaacctcgcctacctcgcccccaaccgcgtgaatttggggttgacgcaagaacgttggccggacatcgtgttccacgaaacgcgcgaacattcggttaaactgtaa

SEQ ID NO: 68987 - DNA, 768 bp, Neisseria meningitidis; identical to SEQ ID NO: 60018

SEQ ID NO: 68988 - DNA, 1968 bp, Neisseria meningitidis; identical to SEQ ID NO: 62011

SEQ ID NO: 68989 - DNA, 1251 bp, Neisseria meningitidis; identical to SEQ ID NO: 56158

SEQ ID NO: 68990 - DNA, 1389 bp, Neisseria meningitidis; identical to SEQ ID NO: 60822

SEQ ID NO: 68991 - DNA, 165 bp, Neisseria meningitidis; identical to SEQ ID NO: 54463

SEQ ID NO: 68992 - DNA, 351 bp, Neisseria meningitidis; identical to SEQ ID NO: 54522

SEQ ID NO: 68993 - DNA, 2148 bp, Neisseria meningitidis
ttgttgcccttacttttggcatcttgcatcggcggcaatttcggcgtgcagcctgttgtcgaatcaacgccgaccgcgtaccccgtcactttcaagtctaaggacgttcccacttcgccccctgccaaaccttctatagaaaccacgccggtcaatcaacctgccgtcggtgcggcaatgcggctgccaaggcggaatatcgcagcttttgataaaaatggtaatgaaattcccgatagtaagcaggcagaggagtatctgccgctcaaagaggaggatatcctgtttttagacggtacgccgaaagaacaggctgacaaacttaaaaaggaaatcaacggacggtatcctaatgtaacaatctacacgtccgatttaaaagatgctgtgtataaatatgaacatgtccgggccggatatgtttatactagatttggaacagatgaaatcgaacagaactcaggtggtaagcaggttacccaccgcttaggttatgatggttttgtatattattctggagaacgtccttcccaatctttaccgagcgcgggaacggtgaaatattccggaaactggcaatatatgaccgatgtcaaacgtcatcgagcaggtaaggcggttggcattgacaatttgggttatatcacattttatggtaacgatgttggtgcaacttcttatgcggctaaggatgtcgacgaaagggaaaaacatcctgctaaatatacggttgatttcgataagaaaactttgacaggtcaattaattaaaaatcagtatgtgcaaaagaaaaccgatgaaaagaaaccactgaccatttacaacattactgcaaaattggacggcaaccgctttaccggcagtgccaaggtcaatcctgatttagcgaaaaaccctgccggtaatgagcgtttgtttttccatgccgatgccgatcagcggcttgagggcggttttttcggcgataacggagaagagcttgccggacggtttatcagcaacgacaacagcgtattcggcgtattcgcaggcaaaaaaacagagacagcaaacgcagcagatacaaaacctgccctgccgtctggaaaacacaccaaaatcttggattctctaaaaatttccgttgacgaggcgactgatggccatgcccgtaagtttgccatttcctctatgcccgattttggtcatcccgacaaacttcttgtcgaagggcgtgaaattcctttggtaaacaaagaacaaatcatcaagcttgccgacggcaggaaaatgaccgtcagtgcttgttgcgattttctgacctatgtgaaactcggacggataaaaaccgaccgccccgccgccaaaccaaaggcacaggacgaagattccgaagatgaaattggtgaaagcgaagaaaacgaagacgaaatcagcgatgaagaaggcacggaagatgaagtcgtagaagatgaaggcagcgaagaagacgaagtttccgaaggtgataacggtgaaaacgaagaagaaatcgccgaagaagaaaccgaagaagaagttgatgaagccgaagaggagaaagttgaagaacccgaagaagaattgccggcagaagaaggcaacggcggttcaggcagcatcctgcccactccggaagcccctaaaggcagggacatcgaccttttcctgaaaggtatccgcacggcggaagccgacattccaaaaactggaaaagcacactataccggcacttgggaagcgcgtatcggcgtaccagataagaaagacgatcagcctggcactacgttcattcaaaaggatagctatgcgaatcaaggggcaaaagcagaatttgacgttgatttcggcgcgaagtcgctttcaggtaagttgacagaaaaaaatgatacacaccccgctgtttatattgaaaacggtgtgattgatggcaacggtttccacgcgacagcacgcactcgggataacggtattgacctttctgggcagggttcgaccagcccgcagagcttcaaagccaacaatcttcttgtaacaggcggcttttatggaccgcaggcggcggaattgggcggtaatattatcgacagcgaccggaaattcggcgcggtattcggtgcgaagaaagataataaagaggtggaaaaatga

SEQ ID NO: 68994 - DNA, 549 bp, Neisseria meningitidis
gtgtctcaaaacactccaatcaaaccttggtacaaacacgtctggccgtggatcttgatggcggggccgatttttgtcgtcatcgccagcgtcgctatgttttttgtcgcacagcagcacgcgacagatttggttacggacgattattataaagacggcaaacatatcgacatccagcttcatcgggatgaagaagccgtcagacggcatatcggggtgcaggttctcatttcccccgatatgaatgcggcaaaagtgtttgtcggcggcgagtttgacggcaaacagcctttgaacctgctgctgatgcacccgacccgcaaggcggacgatcaaaccgtcgccctcaagcccgtcggcagcgcgcagaacggcagggcggaatatgaggcggtgttcaaaaccctttcgccgaccaaccactggtatgtgcgcgtggaggacgcggcaggcgtgtggcgcgtcgagaacaaatggattaccagccaaggcaatgcggtggatctgaccccgatggataaacttttcaataatgccggaagcaaataa

SEQ ID NO: 68995 - DNA, 372 bp, Neisseria meningitidis; identical to SEQ ID NO: 60347

SEQ ID NO: 68996 - DNA, 594 bp, Neisseria meningitidis; identical to SEQ ID NO: 42358

SEQ ID NO: 68997 - DNA, 1239 bp, Neisseria meningitidis; identical to SEQ ID NO: 38584

SEQ ID NO: 68998 - DNA, 204 bp, Neisseria meningitidis; identical to SEQ ID NO: 36264

SEQ ID NO: 68999 - DNA, 618 bp, Neisseria meningitidis; identical to SEQ ID NO: 44520

SEQ ID NO: 69000 - DNA, 348 bp, Neisseria meningitidis; identical to SEQ ID NO: 55469

SEQ ID NO: 69001 - DNA, 4401 bp, Neisseria meningitidis
atgaaaacaaccgacaaacggacaaccgaaacacaccgcaaagccccgaaaaccggccgcatccgcttctcgcctgcttacttagccatatgcctgtcgttcggcattcttccccaagcttgggcgggacacacttatttcggcatcaactaccaatactatcgcgactttgccgaaaataaaggcaagtttgcagtcggggcgaaagatattgaggtttacaacaaaaaaggggagttggtcggcaaatcaatgacaaaagccccgatgattgatttttctgtggtgtcgcgtaacggcgtggcggcattggtgggcgatcaatatattgtgagcgtggcacataacggcggttataacaatgttgattttggtgcggagggaagcaatcccgatcagcaccgtttttcttaccaaattgtgaaaagaaataattataaagcagggactaaaggccatccttatggcggcgattatcatatgccgcgtttgcataaatttgtcacagatgcagaacctgttgagatgaccagttatatggatgggtggaaatataccgatcaaaataattatcctgaccgtgttcgaatcggagcaggcagacaatattggcggtctgatgaagatgaacccaataaccgcgaaagttcatatcatattgcaagtgcgtattcttggctcgttggtggcaatacctttgcacaaaatggatcaggtggtggcacagtcaacttaggtagtgaaaaaattaaacatagcccatatggttttttaccaacaggaggctcatttggcgacagtggctcaccaatgtttatctatgatgcccaaaagcaaaagtggttaattaatggggtattgcaaacaggcaacccctatataggaaaaagcaatggcttccagctagtgcgtaaaaattggttttatgacgaaatttttaccggagatacccattcagtattctacgaaccacatcaaaatgggaaatacacttttcacgacaataataatggcacaggaaaaatcaatgccaaacatgaacacaattctctgcctaatagattaaaaacacgaaccgttcaattgtttaatgtttctttatccgagacagcaagagaacctgtttatcatgctgcaggtggtgtcaacagttatcgacccagactgaataatggagaaaatatttcctttattgacgaagggaaaggcgaattgatacttaccagtaacatcaaccaaggtgctggaggattatatttccaaggagattttacggtctcgcctgaaaacaacgaaacgtggcaaggtgcgggcgttcatatcagtgaagacagtaccgttacttggaaagtaaacggcgtggcaaacgaccgcctgtccaaaatcggcaaaggcacgctgcacgttcaagccaaaggggaaaaccaaggctcgatcagcgtgggcgacggtacagtcattttggatcagcaggcagacgataaaggcaaaaaacaagcctttagtgaaatcggcttggtcagcggcaggggtacggtgcaactgaatgccgataatcagttcaaccccgacaaactctatttcggctttcgcggcggacgtttggatttaaacaggcattcgctttcgttccaccgtattcaaaataccgatgaaggggcgatgattgtcaatcataatgccacaacaacatccaccgttaccattacagggaatgaaagtattacacaaccgagtggtaagaatatcaatagacttaattacagcaaagaaattgcctacaacggttggtttggcgagaaagatgcgaccaaaacgaatgggcggctcaaccttgtttaccagcccgccgcagaagaccgcaccctgctgctttccggcggaacaaatttaaacggtaacatcacgcaaacaaacggcaaactgtttttcagcggcagaccaacaccgcacgcctacaatcatttaaacaaccattggtcgcaaaaagagggcattccgcacggagaaatcgtgtgggacaacgactggattaaccgcacgtttaaagcggaaaatttccatattcagggcgggcaggcggtgatttcccgcaatgttgccaaagtggaaggcgattggcatttgagcaatcacgcccaagcagttttcggtgtcgcaccgcatcaaagccacacaatctgtacacgttcggactggacgggtctgacaaattgtgtcgaaaacaccattaccgacgataaagtgattgcttcattgaccaataccgacatcagcggcaatgtcgatcttgccgatcacgctcatttaaatctcacagggcttgccacgctcaacggcaatctgaccgcaggcggagacacgcactatgaggttacgcacaacgccacccaaagaggcaaccttagcctcgtgggcaatgcccaagcaacatttaatcaagccacattaaacggaaacacatcggcttcgggcaatgcttcatttaatctaagcaacaacgccgtacaaaacggcagtctgacgctttccggcaacgctaaggcaaacgtaagccattccgcactcaacggcaatgtctccctagccgataaggcagtattccattttgaaaacagccgccttaccggacaaatcagcggcggcaaggatacggcattacacttaaaagacagcgaatggacgctgccgtcaggcacggaattaggcaatttaaaccttgacaacgccaccattacactcaattccgcctatcgccacgatgctgcaggcgcgcaaaccggcagtgtgtcagacacgccgcgccgccgttcgcgccgttcgcgccgttcgcgccgttccctattatccgttacaccgccaacttcggcagaatcccgtttcaacacgctgacggtaaacggcaaattgaacggtcagggaacattccgctttatgtcggaactcttcggctaccgcagcgacaaattgaagctggcggaaagttccgaaggcacttacaccttggcggtcaacaataccggcaacgaacctgcaagcctcgaacaattgacggtagtggaaggaaaagacaacaaaccgctgtccgaaaaccttaatttcaccctgcaaaacgaacacgtcgatgccggcgcgtggcgttaccaactcatccgcaaagacggcgagttccgcctgcataatccggtcaaagaacaagagctttccgacaaactcggcaaggcagaagccaaaaaacaggcgggaaaagacaacgcgcaaagccttgacgcgctgattgcggccgggcgcgatgccgtcgaaaagacagaaagcgttgccgaaccggcccggcaggcaggcggggaaaatgtcggcattatgcaggcggaggaagagaaaaaacgggtgcaggcggataaagacagcgccttggcgaaacagcgcgaagcggaaacccggccggctaccaccgccttcccccgcgcccgccgcgcccgccgggatttgccgcaaccgcaaccccaaccgcaaccccaaccgcagccccaaccgcagcgcgacctgatcagccgttatgccaatagcggtttgagtgaattttccgccacgctcaacagcgttttcgccgtacaagacgaattagaccgcgtatttgccgaagaccgccgcaacgccgtttggacaagcggcatccgggacaccaaacactaccgttcgcaagatttccgcgcctaccgccaacaaaccgacctgcgccaaatcggtatgcagaaaaacctcggcagcgggcgcgtcggcatcctgttttcgcacaaccggaccgaaaacaccttcgacgacggcatcggcaactcggcacggcttgcccacggcgccgttttcgggcaatacggcatcgacaggttctacatcggcatcagcgcgggcgcgggttttagcagcggcagcctttcagacggcatcggaggcaaaatccgccgccgcgtgctgcattacggcattcaggcacgataccgcgccggtttcggcggattcggcatcgaaccgcacatcggcgcaacgcgctatttcgtccaaaaagcggattaccgctacgaaaacgtcaatatcgccacccccggtctttcgttcaaccgctaccgcgcgggcattaaggcagattattcattcaaaccggcacaacacatttccatcacgccttatttgagcctgtcctataccgatgccgcttcgggcaaagtccgaacacgcgtcaataccgccgtattggctcaggatttcggcaaaacccgcagtgcggaatggggcgtaaacgccgaaatcaaaggtttcatgctgtccctccacgctgccgccgccaaaggcccgcaactggaagcgcaacacagcgcgggcatcaaattaggctaccgctggtaa

SEQ ID NO: 69002 - DNA, 345 bp, Neisseria meningitidis
atgctgccgaataaagttttgggtaaatatgattggaatgtggacggaaaaacaggaataggcgcggcatgggttgtcgctgcgtttatcctgcccatattggtgtgggcgatatttatgttgtcgcggatgcaaggctggcttgcgccgaccaaggcaaacccgatatgggcgttggtgtggctgctgatctgcatgccctgcctgctgattgcgtccaaatgtttgggttggaaaggctggcggctgttggcaaacgttcttgcctgcctcgccgtgcgcgccctgttgagtgtgcctgccgcgctgctgattgcgttcacgctgcaagacctgctcaaatag

SEQ ID NO: 69003 - DNA, 798 bp, Neisseria meningitidis; identical to SEQ ID NO: 38316

SEQ ID NO: 69004 - DNA, 2163 bp, Neisseria meningitidis; identical to SEQ ID NO: 61851

SEQ ID NO: 69005 - DNA, 1086 bp, Neisseria meningitidis; identical to SEQ ID NO: 56164

SEQ ID NO: 69006 - DNA, 669 bp, Neisseria meningitidis
atgtgtacacgaaaacaacaaggtttcacgctaacagagctgctcatcgtgatggtcattgcagccattatggcgatgatagccctccccaatatgagccaatggattgcatcccgccgcattgccagtcacgcggagcggattgccaaccttttgcgtttctccaggggcgaagccgtccggctcaatctccctgtctatatctgtcctgttcaagttaaaaaagacggtacggtcaacaataaatgtgactccggcaagaaggggcagggaatgttggctttcggcgacaaaaacggcaataagggatatgacaatgatacggcggatgttctcctccgcagtgtggtattgaatgatgatatcaatgataagcggattaattatgccttcaaccatatcgcttttggtcagactcagccgaccaccgaccgtgtagtttggacattcaatcaaaacgggacgttcggttatacgaaagaccagcatcttacaaaacaatccagctttttttattccgacggttatatccaaatcgtgctgacagatgcgagagcagtttcagatgccgataagaaattccgttcggcggtggttttgattgacagcagcggcagggttgaggtttgtcctagaaacgataggcgtaccgtatgccaatataaatga

SEQ ID NO: 69007 - DNA, 1395 bp, Neisseria meningitidis; identical to SEQ ID NO: 61587

SEQ ID NO: 69008 - DNA, 378 bp, Neisseria meningitidis; identical to SEQ ID NO: 60901

SEQ ID NO: 69009 - DNA, 399 bp, Neisseria meningitidis; identical to SEQ ID NO: 54535

SEQ ID NO: 69010 - DNA, 465 bp, Neisseria meningitidis; identical to SEQ ID NO: 36919

SEQ ID NO: 69011 - DNA, 372 bp, Neisseria meningitidis; identical to SEQ ID NO: 55734

SEQ ID NO: 69012 - DNA, 186 bp, Neisseria meningitidis; identical to SEQ ID NO: 38793

SEQ ID NO: 69013 - DNA, 489 bp, Neisseria meningitidis; identical to SEQ ID NO: 54373

SEQ ID NO: 69014 - DNA, 1428 bp, Neisseria meningitidis; identical to SEQ ID NO: 54802

SEQ ID NO: 69015 - DNA, 333 bp, Neisseria meningitidis
atgcagattttatcttttcagccggacattgcggaacgtatgctggaaggtacggaaggcgagtcggtcaacgaaaacgcacaattcgtccgtacggacaacggctattggattgcgtggcatgaaggcgtagcggcactgcttgcgcccgatacgccgccgggcattccctgtttttgggtggaaggcgcggaaagccttgaagagttgtgcgtcatggtggaacgcggcgagtttgacgaagtggaagagtttgacggcgatgacgacgaatggctcgaaacggcacagggttgcggacaccacggcgaagcttgcgcctgcggacattaa

SEQ ID NO: 69016 - DNA, 621 bp, Neisseria meningitidis; identical to SEQ ID NO: 52500

SEQ ID NO: 69017 - DNA, 3606 bp, Neisseria meningitidis
atgtttcattttgcatttccggcacaaactgccctgcgccaagcgataaccgatgcctaccgccgtaatgaaatcgaagccgtacaggatatgttgcaacgtgcacagatgagcgacgaagagcgcaacgccgcctccgagcttgcccgccgtttggttacccaagtccgcgccggccgcaccaaagccggcggcgtagatgcgctgatgcacgagttttcactctccagcgaagaaggcatcgcgctgatgtgtctggcagaagccctgctgcgtatccccgacaacgccacgcgcgaccgcctgattgccgacaagatttcagacggcaactggaaaagccatttgaacaacagcccttccctcttcgtcaacgccgccgcctggggcctgctgattaccggcaaactgaccgccacaaacgacagacaaatgagttccgcactcagccgcctgatcagcaaaggcggcgcaccgctcatccgccaaggcgtaaattacgccatgcggcttctgggcaaacagttcgtaaccggacagaccattgaagaagccctgcaaaacggcaaagaacgcgaaaaaatgggctaccgcttctccttcgatatgttgggcgaagccgcctacacccaagccgatgccgaccgctactaccgcgactatgtcgaagccatccacgccatcggcaaagatgcggcaggacaaggcgtttacgaaggcaacggcatttccgtcaaactttccgccatccatccgcgctactcgcgcgcccaacacggccgtgtgatgggcgaactgttgccgcgcctgaaagagctgttccttttgggtaaaaaatacgatatcggtatcaacatcgatgccgaagaagccaaccgtctggagctgtctttggatttgatggaggctttggtttcagaccctgacttggctggctacaaaggtatcggtttcgttgtccaagcctaccaaaaacgttgtccgttcgttatcgactacctgattgacctagcccgccgcaacaaccaaaaactgatgatccgcctcgtcaaaggcgcgtattgggacagcgaaatcaaatgggcgcaagtggacggcttgaacggctatccgacctacacccgcaaagtccacaccgacatctcctacctcgcctgcgcgcgcaaactgctttccgcgcaagacgcggtattcccgcaatttgccacgcacaacgcctacactttgggcgcgatttaccaaatgggcaaaggcaaagactttgaacaccaatgcctgcacggcatgggcgaaaccctgtacgatcaagtcgtcggcccgcaaaacttaggccgccgcgtgcgcgtgtacgccccggtcggcacacacgaaaccctgctcgcctacttggtgcgccgcctgttggaaaacggcgcgaactcgtctttcgtgaatcaaatcgttgatgaaaacatcagcatcgaccgcctgattaagagcccgttcgacaccatcgccgaacaaggcatccacctgcacaacgccctgccgctgccgcgcgatttgtacggcaaatgccgtctgaactcgcaaggcgtggacttgagcaacgaaaacgtattgcagcagcttcaagaacagatgaacaaagccgccgcgcaagacttccatgccgcatccatcgtcaacggcaaagcccgcgatgtcggcgaagcgcaaccgattaaaaaccctgccgaccacgacgacatcgtcggcacagtcagctttgccgatgccgcgcttgcccaagaagcggttggtgcagccgttgccgcgttccccgaatggagtgcgacacctgccgccgaacgcgccgcctgcctgcgccgtttcgccgacctgctcgaacagcacaccccagcactgatgatgcttgccgtgcgcgaagcaggcaaaacgctgaacaacgccattgccgaagtgcgcgaagccgtcgatttctgccgctactacgcaaacgaagccgaacataccctgcctcaagacgcaaaagccgtcggcgcgattgtcgccatcagcccgtggaacttcccgctcgccatctttaccggcgaagtcgtttccgcattggcggcaggcaacaccgtcatcgccaaacccgccgaacaaaccagcctgattgccggttatgccgtttccctcatgcacgaagccggcatcccgacttccgccctgcaactcgtcctcggcgcaggcgacgtgggtgcggcattgaccaacgatgcccgcatcggcggcgtgatttttaccggctcgaccgaagtggcgcgcctgatcaacaaagcccttgccaaacgcggcgacaatcccgtcctgattgccgaaaccggcggacaaaacgccatgattgtcgattccaccgcacttgccgagcaagtctgcgccgacgtattgaactccgccttcgacagcgcgggacaacgctgctccgccctgcgcattttgtgtgtccaagaagacgttgccgaccgtatgctcgacatgatcaaaggcgcgatggacgaactcgtcgtcggcaaaccgattcagctcactaccgatgtcggccccgtcatcgatgccgaagcacagcaaaacctgttgaaccacatcaacaaaatgaaaggtgttgccaagtcctaccacgaagtcaaaaccgccgccgatgtcgattccaaaaaatccacgttcgttcgccccatcctgtttgaattgaacaacctcaacgaactgcaacgcgaagtcttcggtcccgtcctgcacgtcgtccgctaccgcgccgacgaactcgacaacgtcatcgaccaaatcaacagcaaaggctacgccctgacccacggcgtacacagccgcatcgaaggcacggtacgccacatccgcagccgcatcgaagccggcaacgtttacgtcaaccgcaacatcgtcggcgcagtcgtcggcgtacagcccttcggcggacacggtctgtccggcacaggccccaaagcaggcggttcgttctacctgcaaaaactgacccgcgccggcgaatgggttgccccgaccctgagccaaatcggacaggcggacgaagccgcactcaaacgcctcgaagcactggttcacaaactaccgttcaacgccgaagagaaaaaagccgcagcggccgctttgggacacgcccgcatccgcaccctgcgccgtgccgaaaccgtccttaccggaccgaccggcgagcgcaacagcatctcatggcacgcgcccaaacgcgtttggatacacggcggcagcacggttcaagcctttgccgcactgaccgaacttgccgcctccggcatacaggcagtggtcgaacccgacagccccttggcttcctacaccgccgacttggaaggtctgctgctggtcaacggcaaacccgaaaccgccggcatcagccacgttgccgccctgtcgcctttggacagcgcacgcaaacaggaacttgccgcccacgacggcgcactcatccgcatcctcccttcggaaaacggactcgacatcctgcaagtgtttgaagaaatctcttgcagcgtcaacaccacagccgccggcggcaacgccagcctgatggcggtcgccgactga

SEQ ID NO: 69018 - DNA, 1185 bp, Neisseria meningitidis; identical to SEQ ID NO: 60966

SEQ ID NO: 69019 - DNA, 231 bp, Neisseria meningitidis; identical to SEQ ID NO: 39231

SEQ ID NO: 69020 - DNA, 201 bp, Neisseria meningitidis; identical to SEQ ID NO: 37363

SEQ ID NO: 69021 - DNA, 1341 bp, Neisseria meningitidis; identical to SEQ ID NO: 54905

SEQ ID NO: 69022 - DNA, 960 bp, Neisseria meningitidis; identical to SEQ ID NO: 55891

SEQ ID NO: 69023 - DNA, 1305 bp, Neisseria meningitidis; identical to SEQ ID NO: 54369

SEQ ID NO: 69024 - DNA, 852 bp, Neisseria meningitidis; identical to SEQ ID NO: 55035

SEQ ID NO: 69025 - DNA, 666 bp, Neisseria meningitidis; identical to SEQ ID NO: 60990

SEQ ID NO: 69026 - DNA, 1770 bp, Neisseria meningitidis; identical to SEQ ID NO: 60501

SEQ ID NO: 69027 - DNA, 1008 bp, Neisseria meningitidis; identical to SEQ ID NO: 61572

SEQ ID NO: 69028 - DNA, 435 bp, Neisseria meningitidis; identical to SEQ ID NO: 39784

SEQ ID NO: 69029 - DNA, 213 bp, Neisseria meningitidis; identical to SEQ ID NO: 55102

SEQ ID NO: 69030 - DNA, 432 bp, Neisseria meningitidis; identical to SEQ ID NO: 38797

SEQ ID NO: 69031 - DNA, 201 bp, Neisseria meningitidis; identical to SEQ ID NO: 37363

SEQ ID NO: 69032 - DNA, 1422 bp, Neisseria meningitidis
atggacacaaaagaaatcctcggctacgcggcaggctcgatcggcagcgcggttttagccgtcatcatcctgccgctgctgtcgtggtatttccccaccgacgacatcgggcgcatcgtgctgatgcagacggcggcgggactgacggtgtcggcattgtgcctcgggctggatcaggcatacgtccgcgaatactatgccgccgccgacaaagacactttgttcaaaaccctgttcctgccgccgctgctgtctgccgccgcgatagccgccctgctgctttcccgcccgtccctgccgtctgaaatcctgttttcgctcgacgatgccgccgccggcatcgggctggtgctgtttgaactgagcttcctgcccatccgctttctcttactggttttgcgtatggaagggcgcgcccttgccttttcgtccgcgcaactcgtgcccaagctcgccatcctgctgctgctgccgctgacggtcgggctgctgcactttccggcgaacaccgccgtcctgaccgccgtttacgcgctggcaaaccttgccgccgccgcctttttgctgtttcaaaaccgatgccgtctgaaggccgtccggcacgcaccgttttcgcccgccgtcctgcaccgggggctgcgctacggcataccgatcgcactgagcagcatcgcctattgggggctggcatccgccgaccgtttgttcctgaaaaaatatgccggtctggaacagctcggcgtttattcgatgggtatttcgttcggcggggcggcattattgttccaaagcatcttttcaacggtctggacaccgtatattttccgcgcaatcgaagaaaacgccccgcccgcccgcctctcggcaacggcagaatccgccgccgccctgcttgcctccgccctctgcctgaccggcattttctcgcccctcgcctccctcctgctgccggaaaactacgctgccgtccggtttatcgtcgtatcgtgtatgctgccgccgctgttttgcacgctggtagaaatcagcggcatcggtttgaacgtcgtccgaaaaacacgcccgatcgcgctcgccaccttgggcgcgctggcggcaaacctgctgctgctggggcttgccgtaccgtccggcggcgcgcgcggcgcggcggttgcctgtgccacctcattctggttgttttttgccttcaagaccgaaagctcctgccgcctgtggcagccgctcaaacgcctgccgctttatacgcacacattgctctgcctgacctcctcggcggcctacacctgcttcggcacaccggcaaactaccccctgtttgccggcgtatgggcggtatatctggcaggctgcatcctgcgccactggaaagatttgcacaaactgtttcattatttgaaaaaacaagggtttccattatga

SEQ ID NO: 69033 - DNA, 393 bp, Neisseria meningitidis; identical to SEQ ID NO: 54872

SEQ ID NO: 69034 - DNA, 1449 bp, Neisseria meningitidis
atgaaattgcctattcaaaaattcatgatgctgtttgcagcggcaatatcgttgctgcaaatccccattagtcatgcgaacggtttggatgcccgtttacgcgatgatatgcaggcaaaacactacgaaccgggtggtaaataccatctgtttggtaatgctcgcggcagtgttaaaaatcgggtttacgccgtccagacatttgatgcaactgcggtcggccccatactgcctattacacacgaacggacagggtttgaaggcattatcggttatgaaacccatttttcaggacatggacatgaagtacacagtccgttcgataatcatgattcaaaaagcacttctgatttcagcggcggtgtagacggtggttttactgtttaccaacttcatcggacagggtcggaaattcatccggaggatggatatgacgggccgcaaggcagcgattatccgccccccggaggagcaagggatatatacagctattatgtcaaaggaacttcaacaaaaacaaagactaatattgtccctcaagccccattttcagaccgttggctaaaagaaaatgccggtgccgcctctggttttttcagccgtgcggatgaagcaggaaaactgatatgggaaagcgaccccaataaaaattggtgggctaaccgtatggatgatattcgcggcatcgtccaaggtgcggttaatccttttttaatgggttttcagggattgggagttggggcaattacagacagtgcggtaaacccggtaacctatgcggcagcacggaaaactttacagggtattcacaatttaggaaatttaagtccggaagcacaacttgcggccgcaaccgcattacaagacagtgcttttgcggtaaaagacagtatcaactctgccagacaatgggctgatgcccatccgaacattacagctactgcccaaactgccctttccgtagcagaggccgcaactacggtttggggcggtaaaaaagtagaacttaacccgaccaaatgggattgggttaaaaataccggctataaaaaacctgctgttcgccttatgcagactgtagatggggagatggctggggggaatagaccgcctaaatctataacgtccaacagcaaagcagatgcttccacacaaccgtctttacaagcgcaactaattggagaacaaattagtagtgggcatgcttataacaagcatgtcataagacaacaagaatttacggatttaaatatcaattcaccagcagattttgctcggcatattgaaaatattgttagccatccaacaaatatgaaagagttacctcgcggtagaactgcgtattgggatgataaaacagggacaatagttatccgagataaaaattctgacgatggaggtacagcatttagaccaacatcaggtaaaaaatattatgatgatttatag

SEQ ID NO: 69035 - DNA, 648 bp, Neisseria meningitidis; identical to SEQ ID NO: 44369

SEQ ID NO: 69036 - DNA, 663 bp, Neisseria meningitidis; identical to SEQ ID NO: 38761

SEQ ID NO: 69037 - DNA, 339 bp, Neisseria meningitidis; identical to SEQ ID NO: 39659

SEQ ID NO: 69038 - DNA, 1509 bp, Neisseria meningitidis; identical to SEQ ID NO: 61786

SEQ ID NO: 69039 - DNA, 534 bp, Neisseria meningitidis
atgtttccccccgacaaaccccttttcctctgtctcagcgcactactcctcgcctcatgcggcacgacctccggcaaacaccgccaaccgaaacccaaacagacagtccggcaaatccaagccgtccgcatcagccacatcgaccgcacacaaggctcgcaggaactcatgctccacagcctcggactcatcggcacgccctacaaatggggcggcagcagcaccgcaaccggcttcgattgcagcggcatgattcaattcgtttacaaaaacgccctcaacgtcaagctgccgcgcaccgcccgcgacatggcggcggcaagccgcaaaatccccgacagccgccttaaggccggcgacctcgtattcttcaacaccggcggcacacaccgctactcacacgtcggactctatatcggcaacggcgaattcatccatgcccccagcagcggcaaaaccatcaaaaccgaaaaactctccacaccgttttacgccaaaaactacctcggcgcacatactttctttacagaatga

SEQ ID NO: 69040 - DNA, 3033 bp, Neisseria meningitidis; identical to SEQ ID NO: 62227

SEQ ID NO: 69041 - DNA, 144 bp, Neisseria meningitidis; identical to SEQ ID NO: 38802

SEQ ID NO: 69042 - DNA, 363 bp, Neisseria meningitidis; identical to SEQ ID NO: 55741

SEQ ID NO: 69043 - DNA, 405 bp, Neisseria meningitidis; identical to SEQ ID NO: 54989

SEQ ID NO: 69044 - DNA, 876 bp, Neisseria meningitidis; identical to SEQ ID NO: 54835

SEQ ID NO: 69045 - DNA, 2838 bp, Neisseria meningitidis
gtgattgcaagccgtctctctggaaatatatcttcagctattcaggagcataaagatggtaaagttaatatcaaccgttttcaaaatattttagcggatttatattcattgggagggttaggaagtacattaatagagaagaatggaaatatgcagagttgggggattccattagcaattgctggagatataattgcagcaacggctattgccacaggagatactggtacgatatctacagaggaattttataattttgacaactggaaaggttttgggtatgagctatttgaagactggtctcgttgggtatacgactggctgcccgacggctggaatctgtggaaagaattggacagaaaccgttcaggccaataccacatctacgaccccctcgccctagacctagacggcgacggcatagaaacagtcgccgccaaaggcttttcaggcagcctcttcgaccataacggcaacggcatccgcaccgccactggctgggtttctgccgatgacggtttactcgtccgcgatttgaacggcaacggcatcatcgacaacggcgcggaactcttcggcgacaacaccaaactggcagacggttcttttgccaaacacggctacgcagctttggccgaattggattcaaacggcgacaacatcatcaacgcggcagacgccgcattccaatccctgcgtgtatggcaggatctcaaccaggacggcatttcccaaaccaacgaactccgcacccttgaagaattgggtattcaatctttggatctcgcctataaagatgtaaataaaaatctcggtaacggtaacactttggctcagcaaggcagctacaccaaaacaaacggtacaaccgcaaaaatgggggatttacttttagcagccgacaacctgcacagccgcttcaaagacaaagtggaactcactgccgaacaggcaaaagccgccaatcttgcgggcattggtcgtctgcgcgatttgcgcgaagctgccgcattgtccggcgatttggccaatatgctgaaagcttattctgccgccgaaactaaagaagcacagttggcattgttagataatttgattcacaaatgggcggaaaccgattcgaactggggcaaaaaatcgccaatgcgactttcaaccgattggacgcaaacggctaatgaaggtattgcactgacaccatcccaagtagcacaactaaaaaagaacgctttagtttccctttctgataaagctaaagcaactattgacgccgcccgcgaccgcattgccgtgcttgatgcctacacggggcaggattccaacacactctattacatgagcgaggaagatgcgcttaatatcgtcaaagtaaccaacgatacatacgaccatctcgccaaaaacatctaccaaaacctgttattccaaacccgtttgcagccatatttgaatcaaatcagtttcaaaatggaaaatgatacgttcactttggattttagtggtcttgttcaagcatttaaccatgtcaaagaaactaatccgcaaaaagcttttgtggatttggccgagatgcttgcatatggcgaacttcgttcttggtatgaaggccgaagactaatggccgattatgtggaggaggcaaaaaaagcaggtaaatttgaagattaccagaaagtgttgggtcaggagaccgttgcattattagctaaaacatcgggtacgcaagcagatgatatcctgcaaaatgtaggctttggtcataataaaaatgtttctttatatggtaatgacggcaacgacactctgatcggcggtgcaggcaatgattacttggagggcggcagcggttcggatacttatgtcttcggcaaaggcttcggtcaggatacggtctataattacgactacgctaccggacgcaaagacatcatccgctttaccgacggtattacagccgatatgctgacttttacccgagagggcaaccatcttcttatcaaggcaaaagacggcagtggacaagtgactgttcagtcctatttctagaacgatggctcaggtgcttaccgtatcgatgagattcatttcgataacggcaaagtactggatgttgccactgtcaaaaaactggtacagcaatccaccgacggttcggacagattgtatgcctaccaatccggaagtaccttaaatggcggattgggcgatgactatctgtacggtgccgacgggaatgacctgctgaatggtgatgcaggcaacgacagtatctacagtggcaatggcaatgatacgctcaatggaggagaaggcaacgacgccctgtacggctataatggtaacgatgcactgaatggtggcgaaggcaatgatcatttgaacggcgaagacggtaacgacactctgatcggcggtgccggtaatgattacttggagggcggcagcggttcggatacttatgtcttcggcgaaggcttcggtcaggatacggtctataattaccatgtggataaaaactctgacactatgcactttaaaggatttaaagcagcagatgttcattttatccgttccggaagtgatttggtgcttagcgcttctgaacaagacaacgtacgtatttccggattcttctatggtgaaaaccatcgtgtagatacatttgtctttgatgatgcagctatcagtaatccagattttgccaagtatattaatgctggcaataatttggtacagtctatgtctgtgttcggttctaatactgctgcgacaggaggaaatgtggatgccaatatacaatccgtacagcagccgttattggtaacgccatctgcataa

SEQ ID NO: 69046 - DNA, 885 bp, Neisseria meningitidis
gtggtcggtaacggcaaaaaatatgccgcaccattgctggtgctgggttgcgtggtgttcggtctgggcagtctgattgtcagatccgtccccgtcggttcgtatgcaatcgcattttggcggttgctgatttcggtgttcgtattttggtttttagcacggtttttcaggcaaaaattcccaaaaaacaggaaaaccgtccgatatgccctgacggcgggcgtgtttctcgctttcgatttggcgttgtggcacgaaagcatacacgcggtcgggccgggtatttccaccctgctcaacagcctgcaaatctttttcttgtcggcaatcggtgttttctttttcggcgagcgtttgagcgggctgaaaaaggcaggcttaatatcggcagttgccggcgtggcgatgattgccggtgcggaattcggctacaacggtaatgcggtttggggattcgtcagcggtttggtatcgggactgatgctcgccctgtcgatggtgttcgtccgcaaaacccatgaaatcgagacggtggcgcttttcccttcaatgatgattttgagtttgggcggcgcggtatcgctggttgttccggcattgctgatggatggcggcgcgctttatccgacgacttggaaagatgcgggtttggtgcttgtgtacggcgtggtgatgcagtgcttcgcgtgggcgatggttgcctatgcgattccgctgctttcgctgtcgctgacggggctgctgcttttgtccgaaccggttgccgccctgttcatcgattatttcgggttgggcaaaccgattgaaggcgtgcagtgggcaggggtggcgctgacgctttcggcaatttacctcggttcgctgaaacagcagtccgagccttga

SEQ ID NO: 69047 - DNA, 822 bp, Neisseria meningitidis; identical to SEQ ID NO: 55211

SEQ ID NO: 69048 - DNA, 777 bp, Neisseria meningitidis; identical to SEQ ID NO: 55779

SEQ ID NO: 69049 - DNA, 1260 bp, Neisseria meningitidis; identical to SEQ ID NO: 55040

SEQ ID NO: 69050 - DNA, 1692 bp, Neisseria meningitidis; identical to SEQ ID NO: 60568

SEQ ID NO: 69051 - DNA, 2652 bp, Neisseria meningitidis; identical to SEQ ID NO: 60913

SEQ ID NO: 69052 - DNA, 1785 bp, Neisseria meningitidis; identical to SEQ ID NO: 55819

SEQ ID NO: 69053 - DNA, 594 bp, Neisseria meningitidis; identical to SEQ ID NO: 55464

SEQ ID NO: 69054 - DNA, 486 bp, Neisseria meningitidis; identical to SEQ ID NO: 61142

SEQ ID NO: 69055 - DNA, 453 bp, Neisseria meningitidis; identical to SEQ ID NO: 61764

SEQ ID NO: 69056 - DNA, 537 bp, Neisseria meningitidis; identical to SEQ ID NO: 61429

SEQ ID NO: 69057 - DNA, 1479 bp, Neisseria meningitidis; identical to SEQ ID NO: 61579

SEQ ID NO: 69058 - DNA, 156 bp, Neisseria meningitidis; identical to SEQ ID NO: 48505

SEQ ID NO: 69059 - DNA, 630 bp, Neisseria meningitidis; identical to SEQ ID NO: 40769

SEQ ID NO: 69060 - DNA, 282 bp, Neisseria meningitidis; identical to SEQ ID NO: 60486

SEQ ID NO: 69061 - DNA, 1302 bp, Neisseria meningitidis
atgaccgaatccctccgcctccctgccgcctcgctcaaaccttccaccgtcgccctgcccggctccaaaagcatcagcaaccgcaccctgctgctcgccgccttgtccgacaatacttgtgaaatccattccctgctcaaatccgacgataccgaccgtatgctcgaagcactcgataaactcggcgttgaaatcgaatatcttgccgaagaccgtctgaaagtgcacggcacaggcggacgcttccccaaccgcactgccgatttgtttttgggcaacgcgggcacggcgttccgtccgctgactgccgcacttgccgttttgggcggcgattatcatctgcacggcgtgcctcgtatgcacgaacgccccatcggcgatttggccgatgcgctgcggattgccggcgccgatgtcgaatatctcggcaaggaacactatccgccgcttcatatcggcaaacgtcaagacaacggcgaacgcgtgattccgattaaaggcaatgtgtccagccagtttctgaccgcccttttaatggcgttgccgctgaccgggcaggcgtttgaaatccgtatggtcggcgaattgatttccaagccctatatcgacattactttaaaactgatggcgcaattcggcgtacaggttgccaatgaaaactaccgcgtcttcaaaattcccgccgatgcgcactaccacgcgcccgaacacttgcacgtcgaaggcgatgcctccagcgcgtcctacttcctcgcagccggtttgattgccgccacgcccgtctgtgttatcggtatcggcgcaaacagcatacagggcgatgtcgcctttgcccgcgagctggaaaaaatcggggcggacgtggtttggggcgaaaacttcgtcgaagtttcacgcccgaaggaacgtgccgtccaatcctttgatttggatgcgaaccatatccccgatgccgccatgaccctcgccatcgtcgcgcttgctacagggcaaacctgcacgctgcgcaacatcggttcgtggcgcgtcaaagaaaccgaccgcatcgccgcgatggcaaacgagttgcgcaaactcggggcaaaagtcgtcgaagaagccgaagcaattcacatcaccccgcccgaaacgctgacacccgacgccgtcatcgacacgtacgacgaccaccgcatggcgatgtgtttctcgctggtttcgctgttgggcgtacccgtcgtcatcaacgatccgaaatgcacccataaaaccttcccgacttatttcgacgtgttctcttcactgaccgaaacaacggaataa

SEQ ID NO: 69062 - DNA, 696 bp, Neisseria meningitidis; identical to SEQ ID NO: 41477

SEQ ID NO: 69063 - DNA, 201 bp, Neisseria meningitidis; identical to SEQ ID NO: 41439

SEQ ID NO: 69064 - DNA, 762 bp, Neisseria meningitidis; identical to SEQ ID NO: 60556

SEQ ID NO: 69065 - DNA, 687 bp, Neisseria meningitidis
atgacggtgttgcaagaacgttattgtgaggtgtccgaccgtatcggaaaattggttctgcaggcgggaaggaagccgcattccgtcagcctgattgccgtcggtaagactttcccttcagacggcatccgcgaagtttacgccgccggacagcgtgatttcggcgagaactatattcaggagtggtacggcaaaacggaagagttggcggatttgaccgacatcgtgtggcacgtcatcggcgatgtgcagtccaataaaaccaaatttgtcgccgaacgcgcgcattgggtgcataccgtatgccgtctgaaaaccgctgtccggttgagcgaacagcgtccttcctcaatgccgcccttgcaggtgtgtatcgaggtgaatattgcgggcgaggcggtgaagcacggtgtcgcgcccgaagaagcagtcgcgcttgctgtggaagtggcgaagctgccgaatatcgtcgtacgcggactgatgtgtgttgccaaagccaacagcagtgaaacggagttgaaggtgcaatttcaaacgatgcggaaactgcttgccgacctcaatgcggctggcgttaaggcagacgtgctgtctatggggatgtcggacgatatgcctgccgccattgagtgcggtgcgacacacgtccgtatcggcagcgcgattttcgggaaaaggggctga

SEQ ID NO: 69066 - DNA, 285 bp, Neisseria meningitidis; identical to SEQ ID NO: 39838

SEQ ID NO: 69067 - DNA, 867 bp, Neisseria meningitidis; identical to SEQ ID NO: 39010

SEQ ID NO: 69068 - DNA, 393 bp, Neisseria meningitidis; identical to SEQ ID NO: 43975

SEQ ID NO: 69069 - DNA, 1257 bp, Neisseria meningitidis; identical to SEQ ID NO: 54903

SEQ ID NO: 69070 - DNA, 297 bp, Neisseria meningitidis; identical to SEQ ID NO: 54683

SEQ ID NO: 69071 - DNA, 1806 bp, Neisseria meningitidis; identical to SEQ ID NO: 54709

SEQ ID NO: 69072 - DNA, 564 bp, Neisseria meningitidis; identical to SEQ ID NO: 54577

SEQ ID NO: 69073 - DNA, 1059 bp, Neisseria meningitidis; identical to SEQ ID NO: 61611

SEQ ID NO: 69074 - DNA, 285 bp, Neisseria meningitidis
atgttcggcggtcgtctgaaaaacgctccatccattaccgccaaacactttttgaaggaaaatatcatgaaatttattaacacctgccgtaaatacggcgcaaaactggctgttgtaacagctgtcccgctggctttggcgacacaggcaaatgcaacgttgcccgatacggcaaaaaacgctttggaagccgcaaaagccgacggtatggaagccggttggattgtagtgggcattttcgccgcactttttgtcttttccatcgttaagagagtgatgaagtaa

SEQ ID NO: 69075 - DNA, 1074 bp, Neisseria meningitidis; identical to SEQ ID NO: 61513

SEQ ID NO: 69076 - DNA, 186 bp, Neisseria meningitidis; identical to SEQ ID NO: 39217

SEQ ID NO: 69077 - DNA, 738 bp, Neisseria meningitidis
atgctgctgatacccgccatcgatttgaaagaaggacgctgcgtccgcctgagacaagggctgatggaagaggcgaccgtcttttccgattcgcccgccgaaaccgcactgcactggttcaaacaaggcgcgcgccgcctgcatctggtagatttgaacggcgcgtttgccggcgttccgcaaaacctgcccgccatcaaagacatccttgccgccgtcgccaaagacatccccgtacagctcggcggcggcatacgcgatttgaaaaccatcggacaatatttggatttgggtctgaacgacgtgattatcggcacggcggcggtcaaaaaccccgacttcgtgcgcgaggcgtgcaaagccttccccggcaggattattgtcgggctggatgccaaagacggtatggccgccatcgacggctgggcaaccgtaaccgggcatcatgtaattgatttggcaaaacgctttgaagacgacggcgtcaacagcatcatctacaccgacatcgggcgcgacggtatgatgagcggcgtgaacatcgacgcgacggtcaaactcgcccaaaccgtccgcattcccgtcatcgcctccggcggactgaccggcttggacgacatccgcgccctgtgtgccgccgaaaaacatggcgtagcaggcgcgattaccggccgcgcgatttacgagggcagcatcgattttgcccaagcgcagcaactggcagattccctcgactaa

SEQ ID NO: 69078 - DNA, 8400 bp, Neisseria meningitidis
atgaaccgcaccctgtacaaagttgtatttaacaaacatcgaaactgcatgatagtcgttgctgaaaatgccaaacgcgagggcaaaaacacagccgacacccaagctgtaggtattttgccaaatgatattgcgggctttgcgggttttatccattctatctctgttatctcattctccctttcattactgctcggttctgcccttatcctgacttcttcttctgctaatgcccaaggtatcgttgccgacaaatccgcacctgcacagcaacagcctaccatcctgcaaacaggtaacggcataccgcaagtcaatattcaaacccctacttcggcaggggtttctgttaatcaatacgcccagtttgatgtgggtaatcgcggggcgattttaaacaacagtcgcagcaacacccaaacacagctaggcggttggattcaaggcaatccttggttggcaaggggcgaagcacgtgtggttgtaaaccaaatcaacagcagccattcttcacaaatgaatggctatattgaagtgggcggacgacgtgcagaagtcgttattgccaatccggcagggattgcagtcaatggtggtggttttatcaatgcttcccgtgccactttgacgacaggccaaccgcaatatcaagcaggagaccttagcggctttaagataaggcaaggcaatgttgtaatcgccggacacggtttggatgcccgtgataccgatttcacgcagatattgagccatgcggttaagattgatgggcctgtgtggggtaaagatgtgcgtgtgtcggcagggaaaaatgatgtctcagctgatggctctatccggtcttcacactcccctgctacgaatataaattccgacaactcactgtatgccatcgatacaggggcattgggcggtatgtatgccggtaagatcaccctgatcagcactgatcgtgatgcatccgtgcgcaatcaggggcaatggtttgcctcagccggcaatgtggcagtgaatgctgagggtaaactggtcaacacaggcatgattgcagcgacgggagaaaatcatgcggtttcacttcatgcccgcaatgttcataatagcggtacggttgcctcacaggatgatgccaatattcacagccagacgctggacaattcaggtacggtcttatcctcaggtcaattgactgtccgtaatttaggccgtctgaaaaaccataacaacggtacgatccaggctgcacgcttagatatgtcaacaggtggtttggataacacaggtaatattactcaaacaggttcacaagcattggatttggtatctgcaggcaaattcgataacagtggcaagattggtgtaagtgacgttccacagaccggtttgaatcccaatccatcagtcataccacagattccgagtactgcaacaggttcaggcagcagcactgtcttggcatctaagcctggttcaaacaatcccgtttcacctacagcacctgcaaaaaactacgccggaggacgcattcaaacaacaggagcatttgacaatgcaggatcaatcaatgcaggtgggcaaattgacattgccgcccaaaacggtttggaaaattcgggtagtctgaatgcggctaaactacgagtatcaggcgattcatttaacaatacggtaaaaggcaaactccaggcacacgatctggctgttaacactcaaactgctaaaaacagcggtcacttattaactctaaccggcaagattgacaaccgtgaactgcataatgccggagaaattgccgccaacaatctgacactcattcattcgggccgcttgagcaatgataaaaaaggcaatattcgagctgcacatttacagcttgataccgccggtttacataatgcaggtaacattcttgccgatagtggaaccgttaccaccaagaataatcttcgcaatacaggaaaagtttctgttgcacgactaaataccgaaggtcagactctagataatacgcacggacatatagaggctgaaacggttaacatccaaagtcagcaactgactaaccaaagtggccatattactgctaccgaacaactgactatcaatagtcgaaatgtagacaaccaaaacggcaaactcctatctgcaaaccaagcacaattagctgtttcagacggcctatacaaccaacatggtgaaattgccaccaaccggcagttgtctattcacgataaaaatcaaaacactttggcgttaaacaatgcggatggcacgattcaatctgccggtaatgtatcgctacaagccaaatcactcgccaacaatggcacattaacagccggtaacaaactggatattgctttgacggacgatttcgtcgtagagcgcgacctcactgcaggcaaacaattaaatctaagcataaaaggccgtctgaaaaatacccataccctacaagcaagccatacgctcaaactcaatgccggcaatatagataaccaagttacaggcaaaattattggtggagaacaaacggacatcacatccgaacagcatgttgacaacaggggcttgatcaacagcgacggtttgacccacatcggtgcaggtcaaaccctgaccaacaccgggacaggcaaaatctatggcaaccatattgccctggacgcgcaaatactgcttaaccgggaagaaacgacggaaggcagtaccaaagcgggggcaatagctgcaaggaaacgtttggatattggagcgaaagagattcataaccaagaaggtgccctactatccagcgaaggtatttttgccgtaggtaatcgactggatgaacaacatcatgcggcaggcatggccgatacctttgttaatggcagtgccggtttggaagtacaaggtgatgcattgatgtccgttcggaatatgcagaatatcaataatcactttaaaacagagacatacttagccaaagcagaaaagcaagttcgtgactacaccgtactggggcaaaatacctactatcaggcaggaaaagacggtttattcgacaactcgcaaggacaaaaagaccaaactactgctacgttccatttaaaaaatggttctcgtattgaggccaaccaatggcatgtccgagactaccacatcgagacttataaagaacgcatcatcgaaaaccggccggcacacattactgtgggcggtgatttgactgcctcaggtcaaaattggctgaacaaagacagccggattgtagtaggcgggcgtattatcactgatgatttaaaccagaaagaaattaccaatcaaagtacaacaggcaaaggtcgcacagatgctgtcggcacacagtgggattcagttacaaaaaaaggatggtacagcggtagaaaaagacaacgccgtactgaaagaaaccatactccttaccatgatacccaactatttacccacgacttcgacacgcctgtatccgtcatccaacagaatgccgcctccccttcctttcaacccgctgcatctgcaatcaaactgattgacggagtatccacggcagccgtcaatggtcagcgcatccataccggtaatgtggtctcgttaaataacgctactgttactctgcctaacagcagcctctataccacccatcctgacaataaaggctggttggttgaaaccgatcctcaatttgcagactaccgccgctggttgggcagcgactacatgttgcaacaactgcaattggacaccaatcatctacacaaacggctaggcgacggctactacgaacaaaaacttgttaatgaacaaatccatcagttaacaggctaccgccgactcgacggctacaggagtgatgaagaacaattcaaagctctgatggacaacggccttactgctgccaaaacattcggtctcaccccaggtatcgccttgagtgcagagcaagttgcccgcttaacttcagatatcgtttggatggaaaatcaaaccgtcaccctgtctgacggttcgactcaaaccgtactggttcctaaagtctatgccctggcgcgcaaaggtgatctcaatacctccggtggcctgattagtgccgaacaagtcttacttaaactgcaaaacggcaacctgactaacagcggtaccattgcggggcgacaggccgtactcatccaggcacggaatattaacagcaacggtaacattcaagccgaccaaatcggcttaaaagctgaaaaaagtatcaatatcgacggcgggcaggtacaagcaggcagactgctgactgcccaagcgcaaaatatcaaccttaacggtacaacccaaacttccggtaatgaacgtaacggcaataccgccatcgatcgtatggccggcattaacgtggtcggaagccatactgagcaagtagataacagaacttcagacggcatcctatccctgcatgccggcaacgatatcaacctcaatgcggccaccgtctctaaccaagttaaaggcggcactacccaaattaccgccggcaataatctcaacctcggcaccattcataccgaacatcgcgaagcctatggtacattagatgacgagaaccatcgccatgtccgccaaagtaccgaagtcggcagcagtatccgcacgcaaaacggcgcactgcttagagccggtaacgacttaaaaatccgccaaggcgaactggaggccgaagaaggcaaaaccgtccttgccgcgggacgtgatgtcactatcagcgaaggacgccaaataaccgaactggatacctcggtaagcggaaaaagcaaaggcatcctttccagtaccaaaacacaggatcgctaccgcttcagtcatgatgaagcagtcggcagcaacatcggcggcggcaaaatgattgttgcagccgggcaggatatcaatgtacgcggcagcaaccttatttctgataagggcattgttttaaaagcaggacacgacatcgatatttctactgcccataatcgctataccggcaatgaataccacgagagcaaaaaatcaggcgtcatgggtactggcggattgggctttactatcggtaaccggaaaactaccgatgacactgatcgtaccaatattgtccatacaggcagcattataggcagcctgaatggagacaccgttacagttgcaggaaaccgctaccgacaaaccggcagtaccgtctccagccccgaggggcgcaataccgtcacagccaaaagcatagatgtagagttcgcaaacaaccggtatgccactgactacgcccatacccaggaacaaaaaggccttaccgtcgccctcaatgtgcccgttgtccaagctgcacaaaacttcatacaagcagcccaaaatgtgggcaaaagtaaaaataaacgcgttaatgccatggctgcagccaatgctgcatggcagagttatcaagcagcccaacaaatgcaacaatttgctccaagcagcagtgcgggacaaggtcaaaacaacaatcaaagccccagtatcagtgtgtccatcacctacggcgaacagaaaagtcgtaacgagcaaaaaagacattacaccgaagcggcagcaagtcaaattatcggcaaagggcaaaccacacttgcggcaacaggaagtggggagcagtccaatatcaatattacaggttccgatgtcatcggccatgcaggtactgccctcattgccgacaaccatatcagactccaatctgccaaacaggacggcagcgagcaaagcaaaaacaaaagcagtggttggaatgcaggcgtagccgtcaaaataggcaacggcatcaggtttggaattaccgccggaggaaatatcggtaaaggtaaagagcaagggggaaatactacccaccgccacacccatgtcggcagcacagccggacaaaccaccatccgcagcggcggggataccaccctcaaaggtgcgcagctcatcggcaaaggcatacaggcagatacgcgcaacctgcatatagaaagtgttcaagatactgaaacctatcagagcaaacagcaaaacggcaatgtccaagttactgtcggttacggattcagtgcaagcggcagttaccgccaaagcaaagtcaaagcagaccatgcctccgtaaccgagcaaagcggtatttataccggagaagacggctatcaaatcaaagtcagagacaacacagacctcaagggcggtatcatcacctccacccgaagtgccgaaagcaaagggaaaaaccgctttcagacggccaccctcacccatcgcgacattcaaaaccacagccgctacgaaggcagaagcttcggcataggcggcagtttcgacctgaacggcggctgggacggcacggttaccgacaaacaaggcaggcctaccgacaggataagcccggcagccggctacggcagcgacggagacagcaaaaacagcaccacccgcagcggcatcaacacccgcaacatacacatcaccgacgaagcgggacaacttgcccgaacaggcaggactgcaaaagaaaccgaagcgcgtatctacaccggcatcgacaccgaaactgcggatcaacactcaggccgtctgaaaaacagcttcgacaaagacgcggtcgccaaagagatcaacctgcaaagggaagtaacgaaggagttcggcagaaacgccgcccaagccgtagcggccgttgccgacaaactcggcaatacccaaagttacgaacggtatcaggaagcccgaaccctgctggaggccgaactgcaaaacacggacagcgaagccgaaaaagccgccatccgcgcatccctcggccaagtaaacgcctatcttgccgaaaaccaaagccgctacgacacctggaaagaaggcggcataggcaggagcatactgcacggggcggcaggcggactgacgaccggaagcctcggcggcatactggccggcagcggcacttcccttgctgcaccgtatttggacaaagcggcggaaaacctcggtacggcgggcaaagcggcggtcaacgcactgggcggggcggcaatcggctatgcaactggtggtagtggtggtgctgtggtgggtgcgaatgtagattggcataatcggcagttgcatccgagtgaaagagattggataagaaaaaatgcacaagcttttgcgaaacaggaggtaggtggtagagaacccactatagatgaaattgcattagcagaaaaacgactagcacaacaggcggctaaagagacagatttgttttggatgctaacattagaaaaagtaacagatttatcagctcaaaaattcctaagacaagcaaaaggaacttttacaaatgaaaatggtacgcagcaacaattttttactacgcaagggaagcaatttatgcgtcctgaattgtttgctaatgaagtatatgatctgtctttttacaaaaaccatttacaatctcctaaaaatagtagtatcagcaagggtacaggagaattggctcgaagagttacttcatctacttgggataaagcaaaacaagatcctattttgacaggattgcaaatagctgcctcccctgtacatttagttcgggatgtaggtaaggcaagctggcagtgcgtaagcggctttggacaatgtttgcaacaaggaaaagagaattttgtagaaacaggttctgcaattggaacaggaactgcctcttttcaactaaacgaccttaagccgatttatggtcaagatgtacgtggtgcacaagcaggattggttgcactacaaacggcagatggaataactacggcattgggtgcagcaaaagcattaaatgttgcaggaaaaggtagtcgctattttataaatgaatgggctagtagtccgcctagtggttctcgtgctgcacagcgtggggcagtggggaatttaacccattcgcaacaagttttgacagatggttcacatattcaacgtggcggaaaacttttacctaatattcgctataaagcaggcgagtttgattatttatatgaaactgatactttaggtagaattaaaagttttgaaacagataatttgcaattaacacagagagatagattaaagcataattcaaaaactcctgataaagtcaaggggcaagaccatgcaggacatttaattggagatagatttggaggttcgcccaatttagataatttagtgtcacagcacaaagatgtaaacttaagtgcgtataaagttttggagaataaatgggcggaagcaattaaatcaggaaaaaatgttaaaatccaaatgcaaattgaatatgcagcaggtacaagacaccctacacgatttgttggatattattggattgatggtaaaccaactagaattaatattaataatttatga

SEQ ID NO: 69079 - DNA, 198 bp, Neisseria meningitidis; identical to SEQ ID NO: 36305

SEQ ID NO: 69080 - DNA, 1065 bp, Neisseria meningitidis; identical to SEQ ID NO: 50385

SEQ ID NO: 69081 - DNA, 888 bp, Neisseria meningitidis; identical to SEQ ID NO: 61565

SEQ ID NO: 69082 - DNA, 507 bp, Neisseria meningitidis; identical to SEQ ID NO: 55839

SEQ ID NO: 69083 - DNA, 957 bp, Neisseria meningitidis; identical to SEQ ID NO: 39269

SEQ ID NO: 69084 - DNA, 924 bp, Neisseria meningitidis
atgacgaaaaccgaaccgaacaacgcccaactcgactggttggaatccgaatccatccacattatccgcgaagtggcggcagaatgcgaaaaccccgccctgctcttttccggcggcaaagattccgtggtcctgctcgccctcgcctgcaaagccttccggctgggcagcaggccggtaaaactgcccttcccgctggtgcatatcgacacgggacacaattatcccgaagtgattgccttccgcgacgcgcaggcggcaaaactcaatgcccgcctgatagtggggcgcgtggaagactccatcgccaaaggcacagtagttttacgcaaagaaaccgattcgcgcaatgcggcgcaggcggttacgctgttggaaaccatcgaggcaaacggctttgacgcgctgatgggcggcgcgcggcgcgacgaagaaaaagcccgcgccaaagaacggattttctcgttccgcgacgagttcggacaatggaatccgaaggcgcaacgccccgagctgtggtcgctgtacaacaccaggctgcacaaaggcgaaaatatgcgcgtcttcccgatttccaactggacggaactcgacatctggcaatacatcgcccgcgaaaacctcgaactgccgccgatttattacagccacaggcgcgaagtggtcagacgcagggggctgctggtctccgttacgccgcttacgccgaaaatgccgtctgaaacctccgaaatccttgatgtccgcttccgcaccgtcggcgacatcagctgcacctgcccggtagaaagcaccgcgtccacgccgacggagattatcagggaaacggcggttgccgacatttccgaacgcagcgcgacccggctggacgatcaggcaagcgaggcggcaatggaaaaacgcaaaaaagaaggctatttctaa

SEQ ID NO: 69085 - DNA, 669 bp, Neisseria meningitidis; identical to SEQ ID NO: 55451

SEQ ID NO: 69086 - DNA, 438 bp, Neisseria meningitidis; identical to SEQ ID NO: 61084

SEQ ID NO: 69087 - DNA, 1329 bp, Neisseria meningitidis; identical to SEQ ID NO: 61096

SEQ ID NO: 69088 - DNA, 396 bp, Neisseria meningitidis; identical to SEQ ID NO: 54211

SEQ ID NO: 69089 - DNA, 1215 bp, Neisseria meningitidis; identical to SEQ ID NO: 38760

SEQ ID NO: 69090 - DNA, 279 bp, Neisseria meningitidis; identical to SEQ ID NO: 55063

SEQ ID NO: 69091 - DNA, 1449 bp, Neisseria meningitidis; identical to SEQ ID NO: 49560

SEQ ID NO: 69092 - DNA, 3987 bp, Neisseria meningitidis; identical to SEQ ID NO: 61099

SEQ ID NO: 69093 - DNA, 159 bp, Neisseria meningitidis; identical to SEQ ID NO: 43473

SEQ ID NO: 69094 - DNA, 1428 bp, Neisseria meningitidis; identical to SEQ ID NO: 54904

SEQ ID NO: 69095 - DNA, 2262 bp, Neisseria meningitidis; identical to SEQ ID NO: 60698

SEQ ID NO: 69096 - DNA, 357 bp, Neisseria meningitidis; identical to SEQ ID NO: 36545

SEQ ID NO: 69097 - DNA, 2838 bp, Neisseria meningitidis; identical to SEQ ID NO: 60414

SEQ ID NO: 69098 - DNA, 936 bp, Neisseria meningitidis; identical to SEQ ID NO: 61580

SEQ ID NO: 69099 - DNA, 1764 bp, Neisseria meningitidis; identical to SEQ ID NO: 60602

SEQ ID NO: 69100 - DNA, 1836 bp, Neisseria meningitidis; identical to SEQ ID NO: 44240

SEQ ID NO: 69101 - DNA, 780 bp, Neisseria meningitidis; identical to SEQ ID NO: 60838

SEQ ID NO: 69102 - DNA, 819 bp, Neisseria meningitidis; identical to SEQ ID NO: 37573

SEQ ID NO: 69103 - DNA, 654 bp, Neisseria meningitidis; identical to SEQ ID NO: 55457

SEQ ID NO: 69104 - DNA, 1173 bp, Neisseria meningitidis
atgaacattaccatcgtcgccccttattgctcgctgccgtccgagccgcatttcaaccgcttctggtatcttgccgagctgttgtcgcagtcgcatgacgtgttgctgattaccagcaacttcaagcactacgacaaatctttcagacggcccgaagatgccgaggccgcctcacaaggccgtctgaaagtcatgctgttggaagaaagcggatacagcaaaaacgtgtctttaggacgcgtgaccagccatcaccgcttcgtcaaacattttgaaaaatggttggaaaactgccgtccgggcgaacaagacgtcgtcttttccgcctatccgctgattgccaccaacctgctgttgggcaaacacaaagcgcgtttgggttacaaactgattgtcgatgtgcaggacgtatggccggagtctttctcctcggtcgtaccgtttttgaaaaaagtaccgcacaagctgctgccctttgcttcacgcgccaaccgggcctaccgctacgccgacgcgctggttgccgtatcgcagacttatctcgaccgcgccaaagaaaccaatccgaacgtacccggcgaagtcatctatattggtgctgactttcccaaactcgatgccgcacctgccaaagattttggcgacgacaaaacccgctttttctacttgggcacgctcagttacagctatgacgtggaaaccgtgtgcaaaggcgttcggaaacttttggacgacggcgaaaatgtagagctgcacatcatgggcggcggccccgatttggacaggctcaaacaatatgcctgcgacggcatcaagttttacggctacattccttacgccgaaatgatgtcggtcgccaagggctgcgacattgccatcaacgccatccagtcctattcaatggcatcgattaccaacaaactctccgactatatggctttgcaaaaaccgattctgaacagccaggtcaacgacgaagttgccgaagtccttaccctgctaccgcatgcgaactaccgttccggtgatgtggacggtttcgttcaagccgccaaagatattttgaagcgcaaaagcgatcctgttcagtccgacgaaatcgtccgccgcttcaaacgcgatgtggcgtatcagaaaatcgtcaacctgattgaaagattagctcatgaataa

SEQ ID NO: 69105 - DNA, 738 bp, Neisseria meningitidis
atgttaagcgcgcgctacctccacctgcacgaagctttgggtttaggcccgatgtggctgaaacaggccgccgccgtcctgccgcccaaaaacacacccgcaaccccggcacaggcacgtcctcaaaccgtccgcgccgccccgatccgcccttcccaaccccataacggtcaggcgcggctcgaaacgatgaaagcgttggaaaccgccgccgtacatacgcgcaaacccgcgcctgaaaccgaaacgcccccgcccggcctttcagacggcatcgcccccgttcccgccgcttcgggcataaccaaacttgccgtcgtcagcctttgcccaccgattgaggatgcggtttacgggcaactgttctacggcaaagcaggtgttctgcttgacaacatactcaaagccgtaggactggatgccgcctatgtccacaaaacctgttgggtgaaaaccgccgccgtcggcaacccgatgccgtctgaagcggcaatcgaaaccgcgacggtttccgtcatgcaggaactcgacggctgccgcgcccccgccgtccttttcctcgggcaggcttttgtccagcctgaacggcaaacgatgattgaaactttgtgcggcagccgtcccttcttcatcatcgaccatcccgcccggcttttacgccaacccgaactcaaagcccgcgcctggcaggtgttgaaacagttgaaacgcgccttgcggcaaggcggcggcagttga

SEQ ID NO: 69106 - DNA, 312 bp, Neisseria meningitidis; identical to SEQ ID NO: 37456

SEQ ID NO: 69107 - DNA, 942 bp, Neisseria meningitidis; identical to SEQ ID NO: 60777

SEQ ID NO: 69108 - DNA, 684 bp, Neisseria meningitidis; identical to SEQ ID NO: 42075

SEQ ID NO: 69109 - DNA, 648 bp, Neisseria meningitidis; identical to SEQ ID NO: 55792

SEQ ID NO: 69110 - DNA, 717 bp, Neisseria meningitidis; identical to SEQ ID NO: 54603

SEQ ID NO: 69111 - DNA, 2751 bp, Neisseria meningitidis; identical to SEQ ID NO: 61327

SEQ ID NO: 69112 - DNA, 1779 bp, Neisseria meningitidis
atgacggttttgaagctttcgcactggcgggtgttggcggagcttgccgacggtttgccgcaacacgtctcgcaactggcgcgtatggcggatatgaagccgcagcagctcaacggtttttggcagcagatgccggcgcacatacgcgggctgttgcgccaacacgacggctattggcggctggtgcgcccattggcggttttcgatgccgaaggtttgcgcgagctgggggaaaggtcgggttttcagacggcattgaagcacgagtgcgcgtccagcaacgacgagatactggaattggcgcggattgcgccggacaaggcgcacaaaaccatatgtgtgacccacctgcaaagtaagggcagggggcggcaggggcggaagtggtcgcaccgtttgggcgagtgtctgatgttcagttttggctgggtgtttgaccggccgcagtatgagttgggttcgctgtcgcctgttgcggcagtggcgtgtcggcgcgccttgtcgcgtttaggtttggatgtgcagattaagtggcccaatgatttggttgtcggacgcgacaaattgggcggcattctgattgaaacggtcaggacgggcggcaaaacggttgccgtggtcggtatcggcatcaattttgtcctgcccaaggaagtagaaaatgccgcttccgtgcaatcgctgtttcagacggcatcgcggcggggcaatgccgatgccgccgtgctgctggaaacgctgttggtggaactggacgcggtgttgttgcaatatgcgcgggacggatttgcgccttttgtggcggaatatcaggctgccaaccgcgaccacggcaaggcggtattgctgttgcgcgacggcgaaaccgtgttcgaaggcacggttaaaggcgtggacggacaaggcgttttgcacttggaaacggcagagggcaaacagacggtcgtcagcggcgaaatcagcctgcggtccgacgacaggccggtttccgtgccgaagcggcgggattcggaacgttttctgctgttggacggcggcaacagccggctcaagtgggcgtgggtggaaaacggcacgttcgcaaccgtcggtagcgcgccgtaccgcgatttgtcgcctttgggcgcggagtgggcggaaaaggcggatggaaatgtccgcatcgtcggttgcgccgtgtgcggagaattcaaaaaggcacaagtgcaggaacagctcgcccgaaaaatcgagtggctgccgtcttccgcacaggctttgggcatacgcaaccactaccgccaccccgaagaacacggttccgaccgctggttcaacgccttgggcagccgccgcttcagccgcaacgcctgcgtcgtcgtcagttgcggcacggcggtaacggttgacgcgctcaccgatgacggacattatctcgggggaaccatcatgcccggtttccacctgatgaaagaatcgctcgccgtccgaaccgccaacctcaaccggcacgccggtaagcgttatcctttcccgaccacaacgggcaatgccgtcgccagcggcatgatggatgcggtttgcggctcggttatgatgatgcacgggcgtttgaaagaaaaaaccggggcgggcaagcctgtcgatgtcatcattaccggcggcggcgcggcaaaagttgccgaagccctgccgcctgcatttttggcggaaaataccgtgcgcgtggcggacaacctcgtcattcacgggctgctgaacctgattgccgccgaaggcggggaatcggaacatacttaa

SEQ ID NO: 69113 - DNA, 789 bp, Neisseria meningitidis; identical to SEQ ID NO: 60565

SEQ ID NO: 69114 - DNA, 996 bp, Neisseria meningitidis; identical to SEQ ID NO: 60933

SEQ ID NO: 69115 - DNA, 2550 bp, Neisseria meningitidis
ttggctttaaaatacagcttcggccgggacctctgcctatccgcaccctatcgtccgtattgccgatgcctgatgacgaaatttacagactgtacgcggtcaaaccgtattcagccgccaacccacaggggatacatcttgaaaaacaacagacaaatcaaactgattgccgcctccgtcgcacttgccgcatcctttcaggcacatgcgggactgggcggactgaatatccggtccaaccttgacgaacccttttccggcagcattaccgtaaccggcgaagaagccaaagccctgctaggcggcggcagcgttaccgtttccgaaaaaggcctgaccgccaaagtccacaagttgggcgacaaagccgtcattgccgtttcttccgcacaggcagtccgcgatcccgtcctggtgttccgcatcggtgcaggcgcgcaggtacgcgaatacaccgccatcctcgatcctgtcggctactcgcccaaaaccaaatctgcactttcagacggcaagacacaccgcaaaaccgctccgacagcagagtcccaagaaaatcaaaacgccaaagccctccgcaaaaccgataaaaaagacagcgcgaacgcagccgtcaaaccggcgcataacggcaaaacccataccgtccgcaaaggcgaaacgcttaaacagattgccgccgccatccgtccgaaacacctgacgctcgaacaggttgccgatgcgctgctgaaggcaaacccaaatgtttccgcacacggcagactgcgtgcgggcagcgtgcttcacattccgaatctgaacaggatcaaagcggaacaacccaaaccgcaaacggcgaaacccaaagccgaaaccgcatccatgccgtccgaaccgtccaaacaggcaacggtagagaaaccggttgaaaaacctgaagcaaaagttgccgcgcccgaagcaaaagcggaaaaaccggccgttcgacccgaacctgtacccgctgcaaatactgccgcatcggaaaccgctgccgaatccgccccccaagaagccgccgcttctgccatcgacacgccgaccgacgaaaccggtaacgccgtttccgaacctgtcgaacaggtttctgccgaagaagaaaccgaaagcggactgtttgacggtctgttcggcggttcgtacaccttgctgcttgccggcggaggcgcggcattaatcgccctgctgctgcttttgcgccttgcccaatccaaacgcgcgcgccgtaccgaagaatccgtccctgaggaagagcctgaccttgacgacgcggcagacgacggcatagaaatcacctttgccgaagtcgaaactccggcaacgcccgaacccgctccgaaaaacgatgtaaacgacacacttgccttagatggggaatctgaagaagagttatcggcaaaacaaacgttcgatgtcgaaaccgatacgccttccaaccgcatcgacttggatttcgacagcctggcagccgcgcaaaacggcattttatccggcgcacttacgcaggatgaagaaacccaaaaacgcgcggatgccgattggaacgccatcgaatccacagacagcgtgtacgagcccgagaccttcaacccgtacaaccctgtcgaaatcgtcatcgacacgcccgaaccggaatctgtcgcccaaactgccgaaaacaaaccggaaaccgtcgataccgatttctccgacaacctgccctcaaacaaccatatcggcacagaagaaacagcttccgcaaaacctgcctcaccctccggactggcaggcttcctgaaggcttcctcgcccgaaaccatcttggaaaaaacagttgccgaagtccaaacaccggaagagttgcacgatttcctgaaagtgtacgaaaccgatgccgcagacgatttgtccgcattgcttcaacctgccgaagcactgtccgttgaggaaaatataacggaaaccgttgccgaaacacccgacttcaacgccaccgcagacgatttgtccgcattacttcaaccttctgaagtacctgccgttgaggaaaatgcagcggaaaccgttgccgatgatttgtccgcactgttgcaacctgctgaagcaccggccgttgaggaaaatgtaacggaaaccgttgccgaaacacccgatttcaacgccaccgcagacgatttgtccgcattacttcaacctgctgaagtacctgccgttgaggaaaatgcagcggaaatcactttggaaacgcctgattccaacacctctgaggcagacgctttgcccgacttcctgaaagacggcgaggaggaaacggtagattggagcatctacctctcggaagaaaatatcccaaataatgcagataccagtttcccttcggaatctgtaggttctgacgcgccttccgaagcgaaatacgaccttgccgaaatgtatctcgaaatcggcgaccgcgatgccgctgccgagacagtgcagaaattgctggaagaagcggaaggcgacgtactcaaacgtgcccaagcattggcgcaggaattgggtatttga

SEQ ID NO: 69116 - DNA, 396 bp, Neisseria meningitidis; identical to SEQ ID NO: 41758

SEQ ID NO: 69117 - DNA, 531 bp, Neisseria meningitidis; identical to SEQ ID NO: 41265

SEQ ID NO: 69118 - DNA, 1077 bp, Neisseria meningitidis; identical to SEQ ID NO: 54444

SEQ ID NO: 69119 - DNA, 1260 bp, Neisseria meningitidis; identical to SEQ ID NO: 45570

SEQ ID NO: 69120 - DNA, 711 bp, Neisseria meningitidis; identical to SEQ ID NO: 42623

SEQ ID NO: 69121 - DNA, 882 bp, Neisseria meningitidis; identical to SEQ ID NO: 60955

SEQ ID NO: 69122 - DNA, 690 bp, Neisseria meningitidis; identical to SEQ ID NO: 36702

SEQ ID NO: 69123 - DNA, 2586 bp, Neisseria meningitidis; identical to SEQ ID NO: 61110

SEQ ID NO: 69124 - DNA, 1128 bp, Neisseria meningitidis; identical to SEQ ID NO: 44813

SEQ ID NO: 69125 - DNA, 525 bp, Neisseria meningitidis
atggtactcttttaccggctgttgaaaaatatgtcttcatctgtttcaagtaaaacgcgctattgggtattggcacttgccgccatcgtgctggaccagtggtcgaagtgggcggtgctgtcgtcgtttcagtatcgggaacgcgtcaatgtcattccttcctttttcgatctgacgctggtgtacaacccgggtgcggcgttcagcttccttgccgatcagggcggctggcaaaaatacttttttttggtgctggcggtggcggtgagcgcgtatttggtacgcgccatcttgcgcgatgagtttgcagccctcggcaaaacgggtgcggcgatgattatcggcggtgcgttaggcaatgtcatcgatcgcctgatacacggtcatgtcgtcgatttcttattgttttattggcaaaattggttttatcccgcctttaatattgccgacagttttatctgcgtcggcgcggtattggcagtgcttgacaatatcgtccatcgcaaagatggcaaaaaaacgtga

SEQ ID NO: 69126 - DNA, 2133 bp, Neisseria meningitidis
atgtctatcgtatccgcaccgctccccgccctttccgccctcatcatcctcgcccattaccacggcattgccgccaatcctgccgatatacagcatgaattttgtacttccgcacagagcgatttaaatgaaacgcaatggcttttagctgccaaatctttgggattgaaggcaaaggtagtccgccagcctgtcaaacgtttggctatggcgactttacccgcattggtatggtgtgatgacggcaaccattttattttggctaaaacagacggtgggggtgagcatgcccaatatctaatacaggatttaactacgaataagtctgcggtattgtcttttgccgaattttctaacagatattcgggcaaactgatattggttgcttcccgcgcttcggtattgggcagtttggcaaagtttgactttacctggtttattccggcggtaatcaaataccgccggttgttttttgaagtattggtggtgtcggtggtgttgcagctgtttgcgctgattacgcctctgtttttccaagtggtgatggacaaggtgctggtacatcggggattctctactttggatgtggtgtcggtggctttgttggtggtgtcgctgtttgagattgtgttgggcggtttgcggacgtatctgtttgcacatacgacttcacgtattgatgtggaattgggcgcgcgtttgttccggcatctgctttccctgcctttatcctatttcgagcacagacgagtgggtgatacggtggctcgggtgcgggaattggagcagattcgcaatttcctgaccggtcaggcgctgacttcggtgttggatttggcgttttcgtttatctttctggcggtgatgtggtattacagctccactctgacttgggtggtattggcttcgttgcctgcctatgcgttttggtcggcatttatcagtccgatactgcggacgcgtctgaacgataagttcgcgcgcaatgcagacaaccagtcgtttttagtagaaagcatcactgcggtgggtacggtaaaggcgatggcggtggagccgcagatgacgcagcgttgggacaatcagttggcggcttatgtggcttcgggatttcgggtaacgaagttggcggtggtcggccagcagggggtgcagctgattcagaagctggtgacggtggcgacgttgtggattggcgcacggctggtaattgagggcaagctgacggtggggcagctgattgcgtttaatatgctctcgggacaggtggcggcgcctgttatccgtttggcgcagttgtggcaggatttccagcaggtggggatttcggtggcgcgtttgggggatattctgaatgcgccgaccgagaatgcgtcttcgcatttggctttgcccgatatccggggggagattacgttcgaacatgtcgatttccgctataaggcggacggcaggctgattttgcaggatttgaacctgcggattcgggcgggggaagtgctggggattgtgggacgttcggggtcgggcaaatccacactcaccaaattggtgcagcgtctgtatgtaccggagcagggacgggtgttggtggacggcaacgatttggctttggccgctcctgcctggctgcggcggcaggtcggcgtggtcttgcaggagaatgtgctgctcaaccgcagcatacgcgacaatatcgcgctgacggatacgggtatgccgctggaacgcattatcgaagcagccaaactggcgggcgcacacgagtttattatggagctgccggaaggctacggcaccgtggtgggcgaacaaggggccggcttgtcgggcggacagcggcagcgtattgcgattgcccgcgcgttaatcaccaatccgcgcattctgatttttgatgaagccaccagcgcgctggattatgaaagtgaacgagcgattatgcagaacatgcaggccatttgcgccaaccggacggtgctgattatcgcccaccgtctgtccaccgttaaaacggcacaccggatcattgccatggataaaggcaggattgtggaagcgggaacacagcaggaattgctggcgaagccgaacggatattaccgctatctgtatgatttacagaacgggtag

SEQ ID NO: 69127 - DNA, 312 bp, Neisseria meningitidis
atggcttccatccacgaccaaattaaagaagtagtaacgacacaccgcgtcgtattgtttatgaaaggtacgaagcagtttccgcaatgcggtttctcttcccgcgccgtgcaaatcctgaacgcggcaggctgcaccgattacgttaccgtcaacgtattggaaaatcccgaagtacgccaaggtattaaagaatacagtgactggccgaccatcccccaactttatgtgaacggcgagtttgtcggcggttcggacatcctgatggaaatgtatgaggcaggcgagctgcaagagctgctgaaagcctga

SEQ ID NO: 69128 - DNA, 1569 bp, Neisseria meningitidis; identical to SEQ ID NO: 54288

SEQ ID NO: 69129 - DNA, 420 bp, Neisseria meningitidis; identical to SEQ ID NO: 54846

SEQ ID NO: 69130 - DNA, 849 bp, Neisseria meningitidis; identical to SEQ ID NO: 37501

SEQ ID NO: 69131 - DNA, 861 bp, Neisseria meningitidis; identical to SEQ ID NO: 55980

SEQ ID NO: 69132 - DNA, 525 bp, Neisseria meningitidis; identical to SEQ ID NO: 60357

SEQ ID NO: 69133 - DNA, 579 bp, Neisseria meningitidis; identical to SEQ ID NO: 54434

SEQ ID NO: 69134 - DNA, 1335 bp, Neisseria meningitidis
gtgggcgaacctgaaaacaaatcatccgaacccgtacgcgagatacaggcatcaaaagaaatgccgtctgaaacctcttccccacgcaaagaaaacgaaacagaagtacacattcctgccgctccttttatcgtcaaacagtccggcagcaacgctttggcagtctgcgccctggtattggcggcattgggtttgggtacaagtggttttttgtttgtccaaggacagaatgtcttgaaaaaccaagagctggcattcaaccaaaaaatcgacaaagccgctttgggcgagtcggaaaacgccgccctgctcaaagacaacctcaaccggcaagccgccatacaatcagagctcgaccgtttggacggaaacgtcaaagcaaacggcgaacaaatcttggaaatgcaaaaatcctatcgcgagttgaccaaaggacgcgccgattggctggtggacgaaaccgagaccatactcaatctggcggcgcaacagctggtgttgactggcaatatccaaacggcagtcggcgtattggagcatatcgacagccgcctgtcccgtttcaatcaggcagagcttctgccgatcaagcaggcggtcagcagcgacttggcggaactgaaaaaccgtccctatgtcgatatttccggcacggcattgcgcctcgacaggctggaaatcgccgtatccggactgccgctgattttggacggcgtattgaaaccgagcgtacaggcacgcaacgaagccgtttccgcttcatggtggcagaacgtatgggaaaaatccctcggcacattgaaggggctggtcgaaatccgccgtttggaaaacaacgatgccatgctgatttctcccgaacaggcctattttgtgcgtgaaaacctgcgtctccgccttttggatgcgcggactgcattaatgcagcgcaacagcgaagtctatcagggcgatttgaacaatgccgaaaccgccgtcagacagtattttgatgccaaatcccccgccacgcagtcgtggttgaaggaattggcggaattgaaggcgttggatgtgcgcatgacggcggatgacggtttgaaaaacagcctaaatgccgtccgcgcctatcgcgacggtacgcgcatgacgacggcggaaaatcaagaagcggaacaggcgacttccgaaccggcaaacgaaaacacagcttccgaaccggctgccgcatcggatgtgaagaccatagaagcaccgtccctgccttcggaacgcaaaccggaacagcctgcaaaaaaacagcccgtaccggaaaaggcagggcgttcgccgtccgctaaaggagaacgcgcatga

SEQ ID NO: 69135 - DNA, 1281 bp, Neisseria meningitidis
atgtcaatttctattttcttgaaacgggtaatattccgacaccacgaaaggcaaatcatgtctgcgcaatcacaaaacaatcatacgtccccattggtcgtcttgaccacgctgttcttcatgatgggttttattacctgcatgaacgacatccttatccctcatttgaaagaaattttcgacctgtcttacgttcaggcgatgctgatccaattctgtttctttaccgcctatgcggtgatgtccatcccgatgggggcttttgtcggcaaagtcggctacaaaaacggcgttatcggcggctttctgctgacggcggtcggatgcctgctgttttatcctgctgcgggcagccattcttacgcggtatttttgggcgcgttgtttattttggcttccggcgtaacgctgcttcaggttgccggtaatccttatgttaccctgctggcgaaacccggcaaggaatcggcaacactgacgctggttcaggcgtttaacgctttgggtacgaccattgcgccgcaaatcggcgcgttcctgattttggcggacgcaacccaaaccgtcagcaaggcggaacagatttcttccgtacagattccctatttgggactggcggggctgctgattatccttgccgttttcgtgaaaatgatccggctgcccgacgcgcgcaaaattgccgccgaggaaagcgcgcacaaccacgacggcaaaaccagcgtatggcaatacaaacatctcgtgttcggtacggcaggcattttctgctatgtcggcgcggaggtgtctatcggttcgttgatggtcaacgtattgggttatctgaaagggctggatcatgcttctgccgcgcattacctgtcgttctattggggcggcgcgatggtcggacgtttcctcggttcggcggtgatggcgaaattcgcgcccaaccgttatttggcgtttaacgcatcggctgcggtcgtactgcttgccgtcgcgatggcgacgggtagcggcaatgcggatgtggcgatgtggtcgctgcttgccatcggttttttcaactcgattatgttcccgacgattttctctttggcaaccaaaggattgggaaaatttaccaacgcggcttccggtgtactgtgtaccgcgattgtcggcggtgcggtcgttcctgtcgtgcagggctgggtggcagatacttacaccctgatgtcttcgtttgtcgtttccgtcatctgttatctgtatatcgtgttttttgcggtgtacggatatagggcggacaaataa

SEQ ID NO: 69136 - DNA, 1272 bp, Neisseria meningitidis; identical to SEQ ID NO: 61210

SEQ ID NO: 69137 - DNA, 1053 bp, Neisseria meningitidis; identical to SEQ ID NO: 52344

SEQ ID NO: 69138 - DNA, 1020 bp, Neisseria meningitidis; identical to SEQ ID NO: 54248

SEQ ID NO: 69139 - DNA, 1314 bp, Neisseria meningitidis; identical to SEQ ID NO: 60937

SEQ ID NO: 69140 - DNA, 1776 bp, Neisseria meningitidis; identical to SEQ ID NO: 62022

SEQ ID NO: 69141 - DNA, 1746 bp, Neisseria meningitidis; identical to SEQ ID NO: 55272

SEQ ID NO: 69142 - DNA, 822 bp, Neisseria meningitidis; identical to SEQ ID NO: 44347

SEQ ID NO: 69143 - DNA, 726 bp, Neisseria meningitidis; identical to SEQ ID NO: 54640

SEQ ID NO: 69144 - DNA, 942 bp, Neisseria meningitidis; identical to SEQ ID NO: 54927

SEQ ID NO: 69145 - DNA, 2298 bp, Neisseria meningitidis; identical to SEQ ID NO: 60871

SEQ ID NO: 69146 - DNA, 1050 bp, Neisseria meningitidis; identical to SEQ ID NO: 54608

SEQ ID NO: 69147 - DNA, 183 bp, Neisseria meningitidis
ttggaaatgtttgatggcgaagtagaagcagatgaaagttattttggcggacaacgcaaaggcaaacgcggtcgcggtgctgccggtaaagtcgccgtattcggtcttttgaagcgaaatggtaaggtttatacggttacagtaccgaattcaaaccgctactttatttcctattatccgtga

SEQ ID NO: 69148 - DNA, 2112 bp, Neisseria meningitidis; identical to SEQ ID NO: 62138

SEQ ID NO: 69149 - DNA, 1584 bp, Neisseria meningitidis
ttgggtacaatcgcaacatcagtgtttcaagtggggaaggcgatggatggacggcgttgggcggtatggggtgcttttgccctgctgccttcggcttttttggcggtaatggtcgttgcgcctttgtgggcggtggcggcgtatgacggtttggcgtggcgcgcggtgctgtcggatgcctatatgctcaaacgtttggcgtggacggtatttcaggcagcggcaacctgtgtgctggtgctgcctttgggcgtgcctgtcgcgtgggtgctggcgcggctggcgtttccggggcgggctttggtgctgcgcctgctgatgctgccttttgtgatgcccacgttggtggcgggcgtgggcgtgctggctctgtttggggcggacggcctgttgtggcgcggacggcaggatacgccgtatctgttgttgtacggcaatgtgtttttcaaccttcctgtgttggtcagggcggcgtatcaggggtttgtgcaagtgcctgcggcacggcttcagacggcacggacgttgggcgcgggggcgtggcggcggttttgggacattgaaatgcccgttttgcgcccgtggcttgccggcggcgtgtgccttgtctttctgtattgtttttccgggttcgggctggcgctgctgctgggcggcagccgttatgccacggtcgaagtggaaatttaccagttggtcatgttcgaactcgatatggcggttgcttcggtgctggtgtggctggtgttgggggtaacggcggcggcagggttgctgtatgcgtggttcggcaggcgcgcggtttcggataaggcggtttcccctgtgatgccgtcgccgccgcagtcggtcggggaatatgtgctgctggcgtttgcggcggaggtgttgtctgtgtgctgcctgtttcctttgttggcaattgttgtgaaagcgtggtcggccggcgaatcgtggcgtgtgttaatggaaagtgaaacgtggcaggcggtgtggaatactttgcgcttctcggcggcggcggtgtttgcggcggcggttttgggtgtggtgtatgcggcggcggcgcggcggtcggcgtggatgcgcgggctgatgtttttgccgtttatggtgtcgccggtttgtgtttcggcgggcgtgctgctgctttatccgcagtggacggcttcgttgccgttgctgctggcgatgtatgcgctgctggcgtatccgtttgtggcaaaagatgttttgtcggcttgggacgcactgccgccggattacggcagggcggcggcgggtttgggcgcaaacggctttcagacggcatgccgcatcacgttccccctcttgaaaccggcgttgcggcgcggtctgactttggcggcggcaacctgcgtgggcgaatttgcggcaaccttgttcctgtcgcgtcccgagtggcagacgctgacgactttgatttatgcctatttggggcgtgcgggtgaggataattatgcgcgggcaatggtgttgacattgctgttgtcggcgttcgcgctgggcattttcctgctgttggacaacggcgaaggcggaaaacagacggaaacgttataa

SEQ ID NO: 69150 - DNA, 492 bp, Neisseria meningitidis; identical to SEQ ID NO: 38741

SEQ ID NO: 69151 - DNA, 504 bp, Neisseria meningitidis; identical to SEQ ID NO: 44607

SEQ ID NO: 69152 - DNA, 174 bp, Neisseria meningitidis; identical to SEQ ID NO: 42248

SEQ ID NO: 69153 - DNA, 387 bp, Neisseria meningitidis; identical to SEQ ID NO: 54318

SEQ ID NO: 69154 - DNA, 873 bp, Neisseria meningitidis; identical to SEQ ID NO: 47176

SEQ ID NO: 69155 - DNA, 780 bp, Neisseria meningitidis; identical to SEQ ID NO: 61368

SEQ ID NO: 69156 - DNA, 198 bp, Neisseria meningitidis; identical to SEQ ID NO: 55598

SEQ ID NO: 69157 - DNA, 303 bp, Neisseria meningitidis; identical to SEQ ID NO: 44727

SEQ ID NO: 69158 - DNA, 1188 bp, Neisseria meningitidis; identical to SEQ ID NO: 54494

SEQ ID NO: 69159 - DNA, 435 bp, Neisseria meningitidis; identical to SEQ ID NO: 55914

SEQ ID NO: 69160 - DNA, 705 bp, Neisseria meningitidis; identical to SEQ ID NO: 37373

SEQ ID NO: 69161 - DNA, 606 bp, Neisseria meningitidis; identical to SEQ ID NO: 61088

SEQ ID NO: 69162 - DNA, 510 bp, Neisseria meningitidis; identical to SEQ ID NO: 54807

SEQ ID NO: 69163 - DNA, 579 bp, Neisseria meningitidis; identical to SEQ ID NO: 61948

SEQ ID NO: 69164 - DNA, 699 bp, Neisseria meningitidis; identical to SEQ ID NO: 60799

SEQ ID NO: 69165 - DNA, 165 bp, Neisseria meningitidis
atggcggaaaaattgggacataaggtattgcctcttgcaccttattcacctgagctcaacccgattgagaaagtgtgggcgaatattaagcggtatctgcgaaccgttttgtctgattacgcccgatttgacgatgcactactgtcctattttgattttaattga

SEQ ID NO: 69166 - DNA, 561 bp, Neisseria meningitidis; identical to SEQ ID NO: 37658

SEQ ID NO: 69167 - DNA, 1185 bp, Neisseria meningitidis; identical to SEQ ID NO: 60658

SEQ ID NO: 69168 - DNA, 729 bp, Neisseria meningitidis
atgactacttaccgtatcgcacccagcattttatcggcagattttgcacggcttggcgaagaggtggaaagcgtcattgcggcaggtgcagatctgatccattttgacgtgatggacaaccattatgtgccgaacctgaccttcggccctatggtttgcgcggcgttgaagccttatgcaagcgtgccgatcgatgtgcatctgatggtcgaacccgttgacgacctgattcagtcgtttgccaaagcaggagcatcaatcatcacgttccatcccgaagcgagccgccatatcgaccgcagcttgagcctgattcgggacatgggctgtcaggcggggctggtgttgaatccggcaacgcccgtatatctgttggaaaacgtattggacaggctggatatggttttgctgatgtcggtcaaccccggattcggcggacaaagcttcatcccgcacacccttgaaaaaatccgccgggtgcgggcgatgctggatcggtacgaagcacaaagcgggcggcacatcgccatcgaagtggacggcggcatcaaaaccgacaatattgccgccgttgcccgagctggtgcggatacctttgttgccggttctgcgattttcggcaaaccagactataaggcggtgattgatgcgatgagggcggaactggaaaaaagcggcaggctgaaccttgcgccaatgattgaaatagaaatgccgtctgaaaattag

SEQ ID NO: 69169 - DNA, 510 bp, Neisseria meningitidis; identical to SEQ ID NO: 54265

SEQ ID NO: 69170 - DNA, 1068 bp, Neisseria meningitidis; identical to SEQ ID NO: 55570

SEQ ID NO: 69171 - DNA, 684 bp, Neisseria meningitidis; identical to SEQ ID NO: 61632

SEQ ID NO: 69172 - DNA, 198 bp, Neisseria meningitidis; identical to SEQ ID NO: 37567

SEQ ID NO: 69173 - DNA, 933 bp, Neisseria meningitidis
atgtatgagataaaacagccttttcatagcggatacttgcaggtgtctgaaattcatcaaatttattgggaagagtcgggcaatcctgacggtgtgccggtcatttttttacacggcgggccgggcgcgggggcttcgcctgaatgtcggggtttttttaatcctgatgtgttccgcatcgtcattattgaccagcgcggttgcggacgttcgcgcccgtatgcttgtgcggaagacaatacgacttgggatttggtggcggatattgaaaaagtccgtgaaatgctgggtatcgggaaatggctggtgttcggcggttcgtggggcagcactttgtcgctggcttatgcccaaacccatccggaacgggtaaagggattggtattgcgcgggatatttttgtgcaggccgtctgaaacggcgtggctgaacgaggcgggcggtgtgagccggatttatccggaacaatggcaaaaatttgtcgcgccgattgctgaaaatcggcggaaccggctgattgaggcgtatcacgggttgctgtttcatcaagatgaagaagtgtgcctgtctgccgcgaaggcttgggcggattgggaaagctatctgatccgtttcgagccggaggaagtggatgaagatgcttatgcctcgctggcaatcgcgcgtttggaaaaccattattttgtcaacggcggctggttgcagggcgatagggcgattttgaacaatatcggcaaaatacggaatatcccgaccattatcgtgcaggggcggtatgatttgtgtacgccgatgcagagtgcgtgggcgctgtcgaaagcctttccggaagcggaattgagggtggttcaggcagggcatcgtgcgttcgatccgcctttggcggatgcgctggttcaggcggttgaggatattttgccccgtttgttgtaa

SEQ ID NO: 69174 - DNA, 384 bp, Neisseria meningitidis; identical to SEQ ID NO: 58339

SEQ ID NO: 69175 - DNA, 663 bp, Neisseria meningitidis; identical to SEQ ID NO: 60405

SEQ ID NO: 69176 - DNA, 1155 bp, Neisseria meningitidis; identical to SEQ ID NO: 60327

SEQ ID NO: 69177 - DNA, 960 bp, Neisseria meningitidis; identical to SEQ ID NO: 54613

SEQ ID NO: 69178 - DNA, 432 bp, Neisseria meningitidis; identical to SEQ ID NO: 60342

SEQ ID NO: 69179 - DNA, 792 bp, Neisseria meningitidis; identical to SEQ ID NO: 60817

SEQ ID NO: 69180 - DNA, 552 bp, Neisseria meningitidis; identical to SEQ ID NO: 55745

SEQ ID NO: 69181 - DNA, 666 bp, Neisseria meningitidis
gtgcaggcagatttaacctacgccgccgaacgcattacccacaattatccggaagcaaccggtgcagacaaaggcaaaataagcacagtaagcgattatttcaaaaacatccgtacccactctgttcaacctcgactttctcttggctacgatttcggcaactggcgcatcgccgcagattacacgcgctacagaaagtggaatgaaagcaattcttctactaaaaaagttactgaacgtataaacgacaacaacaaagaaaccaaaacagaacatcaggaaaacggcagcttccacgccgcttcttctctcggcttatcagccatttacgatttccaaataagcgataaattcaaaccctatatcggcgcgcgcgtcgcctacggacacgttaagcatcaagttaattcggtcaacaaagaaactattactgttactcctgtggcgagtggcggccctgttataacaggaccgaccagcaaacctgcctatcacgaaagccacagcatccgccgcttgggtcttggtgtcatcgccggtgtcggtttcgacatcacgtccaatctgactttagatgctggctaccgttaccacaactggggacgcttggaaaacactcgcttcaaaacccacgaagcctcattgggcgtgcgctaccgcttctga

SEQ ID NO: 69182 - DNA, 966 bp, Neisseria meningitidis; identical to SEQ ID NO: 60806

SEQ ID NO: 69183 - DNA, 1929 bp, Neisseria meningitidis
atggcaaaagtaatcggtatcgacttaggtacaaccaactcttgtttggccatttccgaaaacggtcaaaccaaagtgatcgaaaacgcagaaggcgcacgcaccacgccgtccgttatcgcttatttggacggcggcgaaatcctcgtcggtgcgcctgccaaacgccaagccgtaaccaacgctaaaaacaccatttacgccgccaaacgcctgatcggccacaaatttgaagacaaagaagtccaacgcgacatcgaatctatgcctttcgaaatcatcaaagccaacaacggcgacgcatgggtaaaagcacaaggcaaagagctgtctcctcctcaaatttccgcagaagtcctgcgtaaaatgaaagaagccgccgaagcttacttgggcgaaaaagtaaccgaagccgtgattaccgtccctgcctacttcaacgacagccaacgtcaagccaccaaagacgcaggccgtatcgccggtttggacgtgaaacgcatcatcaacgagccgaccgcagccgctttggcattcggtatggacaaaggcgacaacaaagaccgcaaagtagccgtatatgacttgggcggcggtactttcgatatttccatcatcgaaatcgccaacctcgacggcgacaaacaattcgaagtattggcaaccaacggcgataccttcttgggcggtgaagacttcgaccaacgcctcatcgaccacatcatcgccgagttcaaaaaagaacaaggcattgatttgaaacaagacgtgatggctctacaacgcctgaaagaagctgccgaaaaagccaaaatcgaattgtccagcggccagcaaaccgaaattaacctgccgtacatcaccatggacgcaaccggcccgaaacacttggcgatgaaaattacccgcgccaaattcgaaagcctggttgaagacctgattacccgctctatcgaaccttgcaaaattgcattgaaagatgccggcttgagcaccggcgacatcgacgacgtaatcttggtcggcgggcagtcccgtatgccgaaagtacaagaagccgtgagagacttcttcggcaaagaaccgcgcaaagacgtgaaccctgacgaagccgttgccgtaggcgcagcgatccaaggcgaagtattgagcggcggccgcagcgacgtattgctactggacgtaactcctctgtctttgggtatcgaaaccatgggcggcgtgatgaccaaactgattcagaagaacaccaccatcccgaccaaagcgtcgcaagtgttctctaccgccgaagacaaccaaagcgcagtaaccatccacgtactgcaaggcgaacgcgaacgcgcttctgccaacaaatctttggggcagttcaacttgggcgacatcgcacctgcaccgcgcggtatgccgcaaatcgaagtaaccttcgacatcgacgccaacggcatcctgcacgtttccgccaaagacaaaggcaccggtaaagcagccaacatcaccatccaaggttcttcaggtttgagcgaagaagaaatcgaacgcatggtgaaagatgccgaagccaatgccgaggaagataaaaaactgactgaattggtcgcttcccgcaaccaagccgaagccctgattcactctgtgaaaaaatctttggccgactacggcgacaaactcgacgcagccgagaaagaaaaaatcgaagccgcgctgaaagaagccgaagaagcagttaaaggcgacgacaaagccgctatcgatgccaaaaccgaagcactgggcacagccagccaaaaactgggggaaatggtttacgctcaagcacaagctgaagcccaagcaggcgaaagcgaacaagccaatgcttctgcaaagaaagacgatgatgtcgtagatgccgactttgaagaagtaaaagacgacaaaaaataa

SEQ ID NO: 69184 - DNA, 825 bp, Neisseria meningitidis
atgaaatggctcttcacccttttggcggtactcaatattgccgtattcggcggcacggtgggctataaattggccgttaaagcgacgggcggcgtgccggaaaaccgggccgtcgaaaacacgccccccgcaacgcccgccgccgacaatgcggcggcatccgtggaggatacggcggcactgctcaaaccgggcgacatcctgaccgaagagcaggccgagcagttgcgcttgaaaaaggaagcggaacagaaaaaactgagggagaaaaaacagcgtgaagaaaaagcccgccgcgaaaaactcgccgcagaaaaggcgcaggcggaacgcgaaaacggcgcggcggatgccttatgcgccgcgcaggcaagcctcacgatggacgaagatgactaccaccgcatcaaaggacttttgggcaaatggtcgcacgttgccagcaggagcgtcgaaaaacgcaccgccaaagccaaacctgccgacaaaacctaccgcgtcgtcctgcccgtttccgccgatgccgaaaatcaggcggcggagctgtctgccaaaggtttcaaccccataccgtttgacggcgcattgagtttgggtgtcggcaacagccgggaaaacgcccaagccctgcaaaaccggcttgccggcgccggattcggcggggcgcatattgtcgaacactttgccgaagccgacaggcaggacgattctttgagcgtgtcgcgtatgacggttttgtttaccggcgtgaatgccgccgatgcggacgaaattcgtaaaatcacgtccctatacggcaaactgaacctcaagtcttgcaaatag

SEQ ID NO: 69185 - DNA, 936 bp, Neisseria meningitidis; identical to SEQ ID NO: 42109

SEQ ID NO: 69186 - DNA, 432 bp, Neisseria meningitidis; identical to SEQ ID NO: 61630

SEQ ID NO: 69187 - DNA, 1314 bp, Neisseria meningitidis; identical to SEQ ID NO: 56016

SEQ ID NO: 69188 - DNA, 810 bp, Neisseria meningitidis; identical to SEQ ID NO: 60807

SEQ ID NO: 69189 - DNA, 501 bp, Neisseria meningitidis; identical to SEQ ID NO: 55120

SEQ ID NO: 69190 - DNA, 390 bp, Neisseria meningitidis
atgtggaaaatcataaaagaggatagtgatgatttaggatttgcaattaaatgcttattctctcaatctattgatttaaatgaattcaagttatggattgaacaagtaatacgagatatgcccattgaggacatccctttttatatttttgacttggcggatttcgatgtaggaattggcgatattggcaatattgtaggttttgctccgagttccagcctgccgaaatcgaaaaaaaatgccttgaccggcattgccttcttaagggggatagatgtctatgaccctcccgtttcaaaagaaaaagcattaaaagccttagagaaatatcctgaaatttatcagaaatttcagcatttctttccgtttgtagagctgcctccgctttaa

SEQ ID NO: 69191 - DNA, 2151 bp, Neisseria meningitidis
atgaaaaccccactcctcaagcctctgctcattacctcgcttcccgttttcgccagtgtttttaccgccgcctccatcgtctggcagctaggcgaacccaagctcgccatgcccttcgtactcggcatcatcgccggcggccttgtcgatttggacaaccgcctgaccggacggctgaaaaacatcatcgccaccgtcgccctgtttaccctctcctcgctcacggcacaaagcaccctcggcacagggctgcccttcatcctcgccatgaccctgatgaccttcggctttaccattttaggcgcggtcgggctgaaataccgcaccttcgccttcggcgcactcgccgtcgccacctacaccacacttacctacacccccgaaacctactggctgaccaaccccttcatgattttatgcggcaccgtactgtacagcaccgccatcatcctgttccaaatcatcctgccccaccgccccgtccaagaaagcgtcgccaacgcctacgacgcactcggcggctacctcgaagccaaagccgacttcttcgaccccgatgaggcagcctggataggcaaccgccacatcgacctcgccatgagcaacaccggcgtcatcaccgccttcaaccaatgccgttccgccctgttttaccgtttgcgcggcaaacaccgccacccgcgcaccgccaaaatgctgcgctactacttcgccgcccaagacatccacgaacgcatcagctccgcccacgtcgactaccaagagatgtccgaaaaattcaaaaacaccgacatcatcttccgcatccaccgcctgctcgaaatgcagggacaagcctgccgcaataccgcccaagccctgcgcgcaagcaaagactacgtttacagcaaacgcctcggccgcgccatcgaaggctgccgccaatcgctgcgtctcctttacgacggcaacgacagccccgacatccgccacctgcgccgtcttctcgacaacctcggcagcgtcgaccaacaattccgccaactccagcacaacggcctgcaggcagaaaacgaccgcatgggcgacacccgcatcgccgccctcgaaaccggcagcctcaaaaacacctggcaggcaatccgtccgcagctaaacctcgaatcaggcgtattccgccatgccgtccgcctgtcccttgtcgttgccgccgcctgcaccatcgtcgaagccctcaacctcaacctcggctactggatactactgaccgcccttttcgtctgccaacccaactacaccgccaccaaaagccgcgtccgccagcgcatcgccggcaccgtactcggcgtaatcgtcggctcgctcgtcccctacttcaccccgtctgtcgaaaccaaactctggattgtcatcgccagtaccaccctctttttcatgacccgcacctacaaatacagtttctccaccttcttcattaccattcaagccctgaccagcctctccctcgcaggtttggacgtatacgccgccatgcccgtacgcatcatcgacaccattatcggcgcatcccttgcctgggcggcagtcagctacctgtggccagactggaaatacctcacgctcgaacgcaccgccgcccttgccgtatgcagcaacggtgcctatctcgaaaaaatcaccgaacgcctcaaaagcggcgaaaccggcgacgacgtcgaataccgcgccacccgccgccgcgcccacgaacacaccgccgccctcagcagcaccctttccgacatgagcagcgaacccgcaaaattcgccgacagcctgcaacccggctttaccctgctcaaaaccggctacgccctgaccggctacatctccgccctcggcgcataccgcagcgaaatgcacgaagaatgcagccccgactttaccgcacagttccacctcgccgccgaacacaccgcccacatcttccaacacctgcccgaaaccgaacccgacgactttcagacggcattggatacactgcgtggcgaactcgacaccctccgcacccacagtagcggaacacaaagccacatcctcctccaacagctccaactcatcgcccgacagctcgaaccctactaccgcgcctaccgccaaattccgcacaggcagccccaaaacgccgcctga

SEQ ID NO: 69192 - DNA, 720 bp, Neisseria meningitidis; identical to SEQ ID NO: 60511

SEQ ID NO: 69193 - DNA, 477 bp, Neisseria meningitidis; identical to SEQ ID NO: 54610

SEQ ID NO: 69194 - DNA, 285 bp, Neisseria meningitidis; identical to SEQ ID NO: 60069

SEQ ID NO: 69195 - DNA, 768 bp, Neisseria meningitidis; identical to SEQ ID NO: 39411

SEQ ID NO: 69196 - DNA, 180 bp, Neisseria meningitidis
atgccgtctgaagccctttcagacggcatttgcattctcaggcaaaatgaacacacgccacaccccgccctgcccctgcggatcaggcacaagctgagacctttgcaaaactcctttccctcccgacagccgaaacccaaacacaggttttcggctgttttcgccccaaatacctcctaa

SEQ ID NO: 69197 - DNA, 1527 bp, Neisseria meningitidis; identical to SEQ ID NO: 62081

SEQ ID NO: 69198 - DNA, 582 bp, Neisseria meningitidis
atgaaaataagatggcggtacggaattgcgttcccattgatattggcggttgccttgggcagcctgtcggcatggttgggacgcatcagcgaagtcgagattgaagaagtcaggctcaatcccgacgaaccgcaatacacaatggacggattggatggcaggcggtttgacgaacagggatacttaaaagaacatttgagcgcgaaaggcgcgaaacagtttcccgaaagcagcgacatccattttgattcgccgcatctcgtgttcttccaagaaggcaggttgttgtacgaagtcggcagcgacgaagccgtttaccataccgaaaacaaacaggttctttttaaaaacaacgttgtgctgaccaaaaccgccgacggcaaacggcaggcgggtaaagttgaagccgaaaagctgcacgtcgataccgaatctcaatatgcccaaaccgatacgcctgtcagtttccaatatggtgcatcgcacggtcaggcgggcggcatgacttacgaccacaaaacaggcatgttgaacttctcatctaaagtgaaagccacgatttatgatacaaaagatatgtaa

SEQ ID NO: 69199 - DNA, 927 bp, Neisseria meningitidis; identical to SEQ ID NO: 54382

SEQ ID NO: 69200 - DNA, 870 bp, Neisseria meningitidis; identical to SEQ ID NO: 38859

SEQ ID NO: 69201 - DNA, 435 bp, Neisseria meningitidis
atgcgccgggcgttgattgcaaaaattaaaattgcccaaaaggagctgggcttggacgatggtacctatcgcgcggtgttggagcgcgtgacgggcaagcggtcgtgtgcggatatggatgtttccgaacttgagtctgttgtcgctgatatgcggtcgcacggatttaagcctaaagcaaaaggtaacccacacggcaaaccgcatctgcgtcggacatcatcagcggcaatgttggacaaagtcgaagccctgctgaccgtcggcggcaaacattggaactatgcacacgcaatggcgcggcggatgtttggtaaggataaggtcgaatatttagacgatacgcagctacataaactggttgctgcgttgcagattgcggaaaacaggaaaacggaaaaagcgggtggggatgatggggttcgaaaaagttga

SEQ ID NO: 69202 - DNA, 1338 bp, Neisseria meningitidis; identical to SEQ ID NO: 55083

SEQ ID NO: 69203 - DNA, 777 bp, Neisseria meningitidis; identical to SEQ ID NO: 62029

SEQ ID NO: 69204 - DNA, 180 bp, Neisseria meningitidis; identical to SEQ ID NO: 39090

SEQ ID NO: 69205 - DNA, 315 bp, Neisseria meningitidis
atgaaacttatctataccgtcatcaaaatcattatcctgctgctcttcctgctgcttgctgtcattaatacggatgccgttaccttttcctacctgccggggcaaaaattcgatttgccgctgattgtcgtattgttcggcgcatttgtagtcggtattgtttttggaatgtttgccttgttcggacggttgttgtcgttacgtggcgagaacggcaggttgcgtgccgaagtaaagaaaaatgcgcgtttgacggggaaggagctgaccgcaccaccggcgcaaaatgcgcccgaatctgccaaacagccttga

SEQ ID NO: 69206 - DNA, 930 bp, Neisseria meningitidis; identical to SEQ ID NO: 54521

SEQ ID NO: 69207 - DNA, 561 bp, Neisseria meningitidis; identical to SEQ ID NO: 61003

SEQ ID NO: 69208 - DNA, 846 bp, Neisseria meningitidis
atgaacaaattttcccaatccggaaaaggtctgtccggttttttcttcggtttgatactggcgacggtcattattgccggtattttgttttatctgaaccagagcggtcaaaatgcgttcaaaatcccggttccgtcgaagcagcctgcagaaacggaaatcctgaaaccgaaaaaccagcctaaggaagacatccaacctgaaccggccgatcaaaacgccttgtccgaaccggatgctgcgacagaggcagagcagtcggatgcggaaaaagctgccgataaagccgacgaggttgaagaaaaggcgggcgagccggaacgggaagagccggacggacaggcagtgcgtaagaaagtgctgacggaagagcgtgaacaaaccgtcagggaaaaagcgcagaagaaagatgccgaaacggttaaaaaacaagcggtaaaaccgtctaaagaaacagagaaaaaagctccaaaagaagagaaaaaggcggaaaaggaaaaagttgcacccaaaccgaccccggaacaaatcctcaacagcggcagcatcgaaaaagcgcgcagtgccgccgccaaagaagtgcagaaaatgaaaacgtccgacaaggcggaagcaacgcattatctgcaaatgggcgcgtatgccgaccgccggagcgcggaagggcagcgtgtcaaactggcaatcttgggcatatcttccaaggtggtcggttatcaggcgggacataaaacgctttaccgggtgcaaagcggcaatatgtctgccgatgcggtgaaaaaaatgcaggacgagttgaaaaaacatgaagtcgccagcctgatccgttctatcgaaagcaaataa

SEQ ID NO: 69209 - DNA, 597 bp, Neisseria meningitidis; identical to SEQ ID NO: 43118

SEQ ID NO: 69210 - DNA, 207 bp, Neisseria meningitidis; identical to SEQ ID NO: 49307

SEQ ID NO: 69211 - DNA, 390 bp, Neisseria meningitidis; identical to SEQ ID NO: 37209

SEQ ID NO: 69212 - DNA, 702 bp, Neisseria meningitidis; identical to SEQ ID NO: 61787

SEQ ID NO: 69213 - DNA, 939 bp, Neisseria meningitidis; identical to SEQ ID NO: 37748

SEQ ID NO: 69214 - DNA, 420 bp, Neisseria meningitidis
ttggctgaaggtcaaaaatcagccgtcaccgagtattacctgaatcacggcgaatggcccggcgacaacagttctgccggcgtggcatcctccaccgacatcaaaggcaaatatgttgcaggggttaaagttgaaaaaggcgtcattaccgccacaatggcttcaagcaacgtaaacaacgaaatcaaagacaaaaaactctccctgtgggccaagcgtcaagacggttcggtaaaatggttctgcggacagccggttgcgcgcgccaacgccaacggcgccaacaacgacgaagtcaccgccgccaacggcaagggcaccgccaacatcgacaccaagcacctgccgtcaacctgccgcgacgcttcatctgccgtttgcatagaaacaccacctacggctttctataaaaatacctaa

SEQ ID NO: 69215 - DNA, 2787 bp, Neisseria meningitidis; identical to SEQ ID NO: 61255

SEQ ID NO: 69216 - DNA, 1152 bp, Neisseria meningitidis; identical to SEQ ID NO: 55765

SEQ ID NO: 69217 - DNA, 465 bp, Neisseria meningitidis; identical to SEQ ID NO: 54821

SEQ ID NO: 69218 - DNA, 312 bp, Neisseria meningitidis; identical to SEQ ID NO: 40776

SEQ ID NO: 69219 - DNA, 1113 bp, Neisseria meningitidis
atgagcaccttcttccagcaaaccgcccaagccatgattgccagacacatcgaccgtttcccgctattgaagttggaccaggtgattgattggcagccgatcgagcagtacctgaaccgtcaaaaaacccgttacctccgagaccaccgcggtcgtcccgcctgtcccctgttgtccatgttcaaagccgtcctgctcggacaatggcacaacctctccgatcccgaactcgaacacagcctcatcacccgcatcgatttcaacctgttttgccgttttgacgaactgagcatccccgattacagcaccttatgccgctaccgcaactggctggcgcaagacgacaccctgtccgaactgttggaactgattaactgccaactgaccgaaaaaggcttaaaagtagagaaagcatccgccgccgtcattgacgccaccattattcagaccgccggcagcgaacagcgtcaggccatagaagtcgatgaagagggacaagtcagcggtcaaaccacactgagtaaggacaaaaatgcccgttggacaaagaaaaacagcctctacaaactcggttacaaacaacatacccgtaccgatgcggaaggctatatcgagaaactgtacatcactcccaccaatgcccatgagtgcacacacctgtcgccgttgttggaaggactgcccaaaggtacgaccgtctatgccgacaaaggctacgacagcaaggaaaaccggcaacatctgaaagaacatcggttgcagaacggcattatgcgcaaagcctgccgcaaccgtccgctgacggaaacgcaaaccaaacgtaaccgatatttatcgaagacccgttatagtggattaaatttaaatcaggacaaggcgacgaagccgcagacagtacaaatagtacggcaaggcgaggcaacgccgtactggtttaaatttaatccactatatgtggtcgaacagagcttcggtacgctgcaccgtaaattccgctatgcgcgggcagcctatttcgggctgagcaaagtgagtgcacaaagccatctgaaggcgatgtgtttgaaccttttgaaagcggccaacaggctaagtgcgcccgctgccgcctaa

SEQ ID NO: 69220 - DNA, 1410 bp, Neisseria meningitidis; identical to SEQ ID NO: 55247

SEQ ID NO: 69221 - DNA, 1503 bp, Neisseria meningitidis; identical to SEQ ID NO: 62197

SEQ ID NO: 69222 - DNA, 780 bp, Neisseria meningitidis
atgcttaaaatcatttccgccaacgtcaacggcatccgctccgcctacaaaaaaggtttttacgaatacatcgccgcatcgggcgccgacattgtctgcgtgcaggaactcaaagcgcaggaggctgatttgtctgccgatatgaaaaatccgcacgggatgcacggtcattggcattgcgccgagaagcgcggttacagcggcgtggcggtgtacagcaaacgcaaacccgacaatgtgcaaatcggtatgggcattgaagaattcgacagggaagggcggtttgtgcgttgcgatttcggcaggttgagcgttatttcgctttatttgcccagcggcagcagcgcggaagaacgccagcaggtgaaataccgtttccttgatgcgttttaccctatgctcgaagcgatgaaaaacgaagggcgcgacattgtcgtctgcggcgactggaacatcgcccaccaaaacatcgacctgaaaaactggaaaggcaaccagaaaaattcaggtttcctgccggaagagcgcgagtggataggcaaggttatccacaagctcggttggacggatatgtggcgcacgctttatcccgatgtgccgggctacacttggtggagcaaccgagggcaggcgtatgcgaaagatgtcgggtggcgcatcgattatcagatggttacgcccgaacttgctgccaaagccgtgtccgcacacgtttataaagatgaaaaattttccgaccatgcgccgctggtcgtggagtatgactatgctgccgaataa

SEQ ID NO: 69223 - DNA, 1410 bp, Neisseria meningitidis
atgacagcacaaaccctctacgacaaactttggaacagccacgtcgtccgcgaagaagaagacggcaccgtcctgctctacatcgaccgccatttggtgcacgaagttaccagccctcaggcatttgaaggcttgaaaatggcggggcgcaagctgtggcgcatcgacagcgtcgtctccaccgccgaccacaacaccccgaccggcgattgggacaaaggcatccaagaccctatttccaagctgcaagtcgatactttggacaaaaacattaaagagtttggcgcactcgcctattttccgtttatggacaaaggtcagggcatcgtacacgttatgggccccgaacaaggcgcgaccctgcccggtatgaccgtcgtctgcggcgactcgcacacttccacccacggcgcattcggcgcactggcgcacggcatcggcacttccgaagtcgagcacacgatggcgacccagtgcattaccgcgaaaaaatccaaatccatgctgattgccgttgacggcaaattaaaagcgggcgttaccgccaaagacgtggcgctctacatcatcgggcaaatcggcacggcaggcggtacaggctacgccatcgagtttggcggcgaagccatccgcagcctttctatggaaagccgcatgactttatgcaatatggcgattgaggcaggcgcgcgctcaggcatggttgccgtcgaccaaaccaccatcgactacgtaaaagataaacccttcgcacccgaaggcgaagcgtgggacaaagccgtcgagtactggcgtacgctggtgtctgacgaaggtgcggtattcgacaaagaataccgtttcaacgccgaagacatcgaaccgcaagtcacttggggtacctcgcctgaaatggttttagacatcagcagcaaagtgccgaatcctgccgaagaaaccgatccggtcaaacgcagcggtatggaacgcgcccttgaatacatgggcttggaagccggtacgccattaaacgaaatccccgtcgacatcgtattcatcggctcttgcaccaacagccgcatcgaagacttgcgcgaagccgccgccatcgccaaagaccgcaaaaaagccgccaacgtacagcgcgtgttaatcgtccccggctccggtttggttaaagaacaagccgaaaaagaaggcttggacaaaattttcatcgaagccggttttgaatggcgcgaaccgggctgttcgatgtgtctcgccatgaacgccgaccgcctgaccccggggcaacgctgcgcctccacctccaaccgtaactttgaaggccgtcaaggcaacggcggacgtacccacctcgtcagccccgctatggcagcagcagccgccgttaccggccgctttaccgacatccgcatgatggcgtaa

SEQ ID NO: 69224 - DNA, 807 bp, Neisseria meningitidis; identical to SEQ ID NO: 52106

SEQ ID NO: 69225 - DNA, 492 bp, Neisseria meningitidis; identical to SEQ ID NO: 60723

SEQ ID NO: 69226 - DNA, 2391 bp, Neisseria meningitidis; identical to SEQ ID NO: 61490

SEQ ID NO: 69227 - DNA, 531 bp, Neisseria meningitidis; identical to SEQ ID NO: 39309

SEQ ID NO: 69228 - DNA, 2064 bp, Neisseria meningitidis
atgatgacccaaacccttttaatcgaactccttaccgaagaacttcccccaaaagccctgaataatttaggcaaccatttcgccgcttccgttgccgaaggcttggaaaaagcgcaactgatagccggcgcggcagaatttaccgcctacgcttctccgcgccgtttggcggttcaagtcaaaaacgtcaaagccgtgcaagccgatcagaaaatcgtgaaaaaaggccctgccgtggcgaatgccgtaaaagacggtgcgccgaccaaggctttggaaggtttcgcacgcggtgcgggcgcgaaaatcgaagacttgaccatcgtccacgacggcaagcaggacgtgtacgcctacgaatacgtccaaaccggcaaaccgttgggcggacttttggaagacattatcaatgccgcagtgaaaaaactgccgattccgaaagtgatgcgttggggcagcagcacatttaccttcgtgcgccccgtccacgggctgattgtgctgcacggcggcgacatcgtaaacgtcagcgttttgggtctgcaaagcagcaatcaaaccttgggacaccgcttcttgtccaacggcgaaatcaccattgaaaacgccgacagctacgccgcacaaatgcgcgagcaaggcaaagtcgtcgcttcgtttgccgagcgcaaagccgcgattcagacggcattggaagggcaggcgcgccgtctgaacgcgaccgttgccgccgatgaagcattgctggacgaagtaaccgcgctggtcgaataccccgttgttttggaagccggttttgaggaacacttcctcgccgtgccgcaggaatgcctgattctgacgatgcagcaaaaccaaaaatacttcccgctgctcgaccaaaacggcaagctgatgaaccgcttcctgctggtttccaacctgcaaaccgaagatccgtcgcacatcatccgaggcaacgaacgcgtcttgcgcgcgcgcctgtctgatgccgagttcttctacaaacaagaccaaaaagcgactctggaaagccgcctgcccaagctggcaaacgtggtgtaccacaacaaaatcggttcgcaagccgaacgcatcgaacgtttgcaaagcattgccgcccacatcgctaaagcgttgggcgcagatgctgccgcagccgagcgcgccgcgcgtcttgccaaagccgatttggttaccgaaatggtcggcgagttccccgaattgcaaggcacgatgggcaaatactatgcccgcttggacggcgaaactgaagaaatcgccgaagccgtcgagcaacattaccaaccgcgttttgccggcgacaagctgcccgaaagcaaaattgccactgccgttgcacttgccgacaagctggaaaccctggtcggcatttggggcatcggtctgattccgaccggcgacaaagacccctacgccctgcgccgcgctgccttgggtattttgcgtatgctgatgcagtatggtttggacgtgaacgaactgattcagacggcattcgacagcttccccaaaggtttgctcaacgaaaaaacgccgtctgaaaccgccgactttatgcaggcgcgccttgccgtgttgctgcaaaacgattatccgcaagacatcgttgccgccgtattggcgaaacagccgcgccgtttggacgacgtagtggcgaaactgcaagccgttgccgcgttcaaacaactgcccgaagccgccgcgctcgccgccgccaacaaacgcgtgcaaaatctgctgaaaaaagccgatgccgagttgggcgcggttaacgaaagcctgctgcaacaggacgaagaaaaagccctctttgccgccgcgcaaggcttgcagccgaaaatcgccgccgccgtcgccgaaggcaatttccaaaccgccttgtccgaactggcttccgtcaagccgcaagtcgatgccttctttgacggcgtgatggtgatggcggaagatgccgccgtaaaacaaaaccgtttgaacctgttgaaccgtttggcagagcagatgaacgcggtagccgacatcgcgcttttgggcgagtaa

SEQ ID NO: 69229 - DNA, 486 bp, Neisseria meningitidis; identical to SEQ ID NO: 39660

SEQ ID NO: 69230 - DNA, 150 bp, Neisseria meningitidis; identical to SEQ ID NO: 41322

SEQ ID NO: 69231 - DNA, 1266 bp, Neisseria meningitidis; identical to SEQ ID NO: 55463

SEQ ID NO: 69232 - DNA, 390 bp, Neisseria meningitidis; identical to SEQ ID NO: 61991

SEQ ID NO: 69233 - DNA, 474 bp, Neisseria meningitidis; identical to SEQ ID NO: 36318

SEQ ID NO: 69234 - DNA, 486 bp, Neisseria meningitidis; identical to SEQ ID NO: 61984

SEQ ID NO: 69235 - DNA, 519 bp, Neisseria meningitidis; identical to SEQ ID NO: 38951

SEQ ID NO: 69236 - DNA, 729 bp, Neisseria meningitidis; identical to SEQ ID NO: 61032

SEQ ID NO: 69237 - DNA, 585 bp, Neisseria meningitidis; identical to SEQ ID NO: 56076

SEQ ID NO: 69238 - DNA, 477 bp, Neisseria meningitidis; identical to SEQ ID NO: 55969

SEQ ID NO: 69239 - DNA, 1287 bp, Neisseria meningitidis; identical to SEQ ID NO: 60386

SEQ ID NO: 69240 - DNA, 2259 bp, Neisseria meningitidis; identical to SEQ ID NO: 61492

SEQ ID NO: 69241 - DNA, 501 bp, Neisseria meningitidis; identical to SEQ ID NO: 55877

SEQ ID NO: 69242 - DNA, 750 bp, Neisseria meningitidis; identical to SEQ ID NO: 60380

SEQ ID NO: 69243 - DNA, 219 bp, Neisseria meningitidis; identical to SEQ ID NO: 54559

SEQ ID NO: 69244 - DNA, 1062 bp, Neisseria meningitidis; identical to SEQ ID NO: 61557

SEQ ID NO: 69245 - DNA, 2559 bp, Neisseria meningitidis; identical to SEQ ID NO: 54653

SEQ ID NO: 69246 - DNA, 468 bp, Neisseria meningitidis
atgattggtgtagcctggtatttaggtgctaatatccgatttgaagagcaatgggtattgtatgaagccttgagaacaactgcatcaattatttttgcagttgttggggtttggttggctattgtctatcccgaacgattaaaaagcccttttagtcaaactttctcctctccggtatatcggcgtggattcaaacagcttttttcccctgttataagttccatttttattttaagtattgtgttacttgttggtttgttggctcctttgctcaaacatattgaggcaataattcaatatatcccactttgtcggaaaatctcatttagcctgttagcaagcttgacgatgtggcaaatttatacggttttatctgtattagtgcctttgttaaatattttaagtaaaaatgaaaatgactgtcatgcatccaacattattaacaagctaaagggtgaacagaattag

SEQ ID NO: 69247 - DNA, 324 bp, Neisseria meningitidis; identical to SEQ ID NO: 51944

SEQ ID NO: 69248 - DNA, 258 bp, Neisseria meningitidis; identical to SEQ ID NO: 55539

SEQ ID NO: 69249 - DNA, 294 bp, Neisseria meningitidis; identical to SEQ ID NO: 37088

SEQ ID NO: 69250 - DNA, 279 bp, Neisseria meningitidis; identical to SEQ ID NO: 56003

SEQ ID NO: 69251 - DNA, 324 bp, Neisseria meningitidis; identical to SEQ ID NO: 55036

SEQ ID NO: 69252 - DNA, 501 bp, Neisseria meningitidis; identical to SEQ ID NO: 55016

SEQ ID NO: 69253 - DNA, 771 bp, Neisseria meningitidis; identical to SEQ ID NO: 54335

SEQ ID NO: 69254 - DNA, 438 bp, Neisseria meningitidis; identical to SEQ ID NO: 59505

SEQ ID NO: 69255 - DNA, 1311 bp, Neisseria meningitidis; identical to SEQ ID NO: 61357

SEQ ID NO: 69256 - DNA, 1008 bp, Neisseria meningitidis
atgagcaccttcttccagcaaaccgcccaagccatgattgctaaacacatcaaccgcttcccgctattgaagttggaccaggtgattgattggcagccgatcgaacagtatctgaatcgtcaaagaacccgttaccttagagaccaccgcggccgtcccgcctaccccctgttgtccatgttcaaagccgtcctgctcggacaatggcacagcctctccgatcccgaactcgaacacagcctcattacccgcatcgatttcaacctgttttgccgctttgacgaactgagcatccccgattacagcaccttatgccgctaccgcaactggctggcgcaagacgacaccctgtccgaattgctcaaactgattaaccgacaactgaccgaaaaaggcttaaaagtagagaaagcatccgccgccgtcattgacgccaccattattcagaccgccggcagcaaacagcgtcaggccatagaagttgacgaagaaggacaaatcagcggtcaaaccacaccgagtaaggacagcgatgcccgttggataaagaaaaacggcctctacaaactcggttacaaacaacatacccgtaccgatgcggaaggctatatcgagaaactgcacatcacccccgccaatgcccatgagtgcaaacacctgccgccgttgttggaaggactgcccaaaggtacgaccgtctatgccgacaaaggctatgacagtgcggaaaaccggcaacatctggaagagcgtcagttgttagacggcattatgcgcaaagcctgccgcaaccgtccgctgacggaaacgcaaaccaaacataaccgatatttgtcgaagatccgttatgtggtcgaacaaagcttcggtacgctgcaccgcaaattccgctatgcgcgggcagcctatttcgggctgattaaagtgagtgcgcaaagccacctgaaggcgatgtgtttgaacctgttgaaagccgccaacaggctaagtgcgcccgctgccgcctaa

SEQ ID NO: 69257 - DNA, 1218 bp, Neisseria meningitidis; identical to SEQ ID NO: 61112

SEQ ID NO: 69258 - DNA, 1458 bp, Neisseria meningitidis; identical to SEQ ID NO: 60500

SEQ ID NO: 69259 - DNA, 246 bp, Neisseria meningitidis; identical to SEQ ID NO: 43892

SEQ ID NO: 69260 - DNA, 1386 bp, Neisseria meningitidis; identical to SEQ ID NO: 60737

SEQ ID NO: 69261 - DNA, 984 bp, Neisseria meningitidis; identical to SEQ ID NO: 62095

SEQ ID NO: 69262 - DNA, 231 bp, Neisseria meningitidis; identical to SEQ ID NO: 39231

SEQ ID NO: 69263 - DNA, 264 bp, Neisseria meningitidis; identical to SEQ ID NO: 60885

SEQ ID NO: 69264 - DNA, 1170 bp, Neisseria meningitidis; identical to SEQ ID NO: 61562

SEQ ID NO: 69265 - DNA, 294 bp, Neisseria meningitidis; identical to SEQ ID NO: 38787

SEQ ID NO: 69266 - DNA, 345 bp, Neisseria meningitidis; identical to SEQ ID NO: 40340

SEQ ID NO: 69267 - DNA, 567 bp, Neisseria meningitidis; identical to SEQ ID NO: 55861

SEQ ID NO: 69268 - DNA, 141 bp, Neisseria meningitidis; identical to SEQ ID NO: 54633

SEQ ID NO: 69269 - DNA, 510 bp, Neisseria meningitidis; identical to SEQ ID NO: 42226

SEQ ID NO: 69270 - DNA, 885 bp, Neisseria meningitidis
atgacttctattattttagaactccaaagcctagctgccaatccaaatagtgatgtagaagagttagtgagtaaaacattaatggttgcaagaaaattaaaaattaatgaattaactgaatggtgtaataatgaattacaaggttatttatcaaaaaatttaccaaaatatagaatattttatggagagttaaaagcttttaacccttatcgtggcgatgttccatttatgcttcccgatgaattgagagaacgagtaacaagagttgaatatacctcatcaattagcgaaataagaaacttactaaaaacaaaaaataataattttatacgaattctatctagtaaagaaaaacagtttttaatgaatttacaagatactccatttccacttgaacctaaaataattatttatccaattaacttaatgaatattcaatcaaaagtaagacaactaattttagcttgggcattacgactggaagaggaaggtattttaggagacggtatccaatttacaaaatcaaaacaggagaaagcaatgtcaaaccaattcaatattcagaatatgcaagggtttattggggatatttttggcggtaatgttcagcaaaatattcaagacggtattcatattgaaaaagaaaatttcaataaactggctaactttttagcaaaaaacgggattccatctgccgaattagaagatttacgaaatgcactgatagaagatggtcagcccacagataaaaaattcggctcaaaagtaagtgcatggattggcaatattattacaaaggcttctaccggtgcaattgatgtttcagtaggtactattgcaggaatattaactaatgcgatttcaaaatattatggcttaatgtaa

SEQ ID NO: 69271 - DNA, 372 bp, Neisseria meningitidis; identical to SEQ ID NO: 61473

SEQ ID NO: 69272 - DNA, 864 bp, Neisseria meningitidis; identical to SEQ ID NO: 61789

SEQ ID NO: 69273 - DNA, 1347 bp, Neisseria meningitidis; identical to SEQ ID NO: 38402

SEQ ID NO: 69274 - DNA, 1386 bp, Neisseria meningitidis; identical to SEQ ID NO: 40781

SEQ ID NO: 69275 - DNA, 420 bp, Neisseria meningitidis; identical to SEQ ID NO: 36338

SEQ ID NO: 69276 - DNA, 1233 bp, Neisseria meningitidis; identical to SEQ ID NO: 47112

SEQ ID NO: 69277 - DNA, 303 bp, Neisseria meningitidis; identical to SEQ ID NO: 39628

SEQ ID NO: 69278 - DNA, 375 bp, Neisseria meningitidis; identical to SEQ ID NO: 36393

SEQ ID NO: 69279 - DNA, 936 bp, Neisseria meningitidis; identical to SEQ ID NO: 56120

SEQ ID NO: 69280 - DNA, 1443 bp, Neisseria meningitidis
atgaaacaattggccatgtacatcaacggacgctttgaaaacgatttcaacggcgaatggcgcgacgtattgaacccgtccaccgaagaggccatcgcccgcgaacccaaaggcggcagggcggacgttgaccgcgccgtagcggcggcgcgtgcggcgcaaccggcttgggagcgtctgcctgcggtcgaacgcggcgcgtatttgcgcaaaatcgcccaaggcatacgcgaacgcgccgacgagctgaccgacaccatcgttgccgaaggcggcaaaaccaaagacttggcgcgcgtggaagtgatgttcaccgccgactatctcgattaccaagccgaatgggcgcgccgttacgaaggcgaaatcatccaaagcgaccgcccgcgcgaaaacattttattgttcaaacgtccgctgggcgtaattgccggcattttgccgtggaacttccctttcttcctgattgcccgcaaaatgggtcccgccttagtaacgggcaacaccatcgttgtcaaacccagcagcgtaaccccgatcaactgccacatcttcgccgaaatcgtcgatgcggtcggattgcccgcaggcgtgttcaacgtggtgaacggtccgggtgcggaaatcggcaatgccttgtccgcccatccgcaagtcgatatggtcagcctgaccggctccgtcgaagcgggccgccaagtgatggaagccgcttccgccaacatcaccaaagtttcgttggaactcggcggcaaagcccccgccatcgttttgaaagacgcggatttggatttggcggtgaaatccatcttggcttcgcgtgtcggcaacaccggtcaaatctgcaactgcgccgagcgcgtttatgtccacagcagtctgaaagacgcattcattgaaaaaatgactgccgccatgaaaggcgtgcgctacggcaaccctgccgaagccgaagcaggcgcgctggaaatgggtccgctgattgaagagcgcgccgtcaaagccgttgccgaaaaagtggaacgggcagtcaaacaaggtgcgaaactggtctgcggcggcaaacgcgccgaaggacgcggttatttcttcgagccgaccctgctgaccgacaccgacaacagtatggacattatgaaagaagaaaccttcggccccgtgctgcccgtttccgctttcgacacgcttgaccaagtcatcgcactggctaacgattgcgagtttggtctgaccagttctgtttatacgactaatttaaacgaagccttctacgttacccgccgcctgcaattcggcgaaacctacatcaaccgcgaaaactttgaagccatgcaaggcttccacgcgggctggaaaaaatccggcatcggcggcgcggacggcaaacacggtttggaagaatatctgcaaacccaagtcgtttatctggaaaccgacatttaa

SEQ ID NO: 69281 - DNA, 945 bp, Neisseria meningitidis; identical to SEQ ID NO: 37790

SEQ ID NO: 69282 - DNA, 2280 bp, Neisseria meningitidis; identical to SEQ ID NO: 54843

SEQ ID NO: 69283 - DNA, 192 bp, Neisseria meningitidis; identical to SEQ ID NO: 42043

SEQ ID NO: 69284 - DNA, 1473 bp, Neisseria meningitidis
atgaaccagacaagccgcgatctgacccgcatcagccacaacaccaaaatcgtcgccaccttggggccgggcagcaacaacgtcgaactgttggaagacatgatccgcgtcggcggtctgaacgtcgtccgcttcaacttcagccacggcacgcccgaattccatcaggaaaacgcccgcattgtgcgcgaggcggcaaaacgcgccggacaggaaatcgccatcattgccgacctgcaagggccgaaaatccgcgtgggcaaaatcgccggcggcggcatcgaattgaacaaaggcgaaacgctggtactggatgccgcgctcgaaggcgaaggcacgcgcgaggcggtcggtttggactaccgcgacctgcccgacgacgttaccgcaggcgacgtattgtggctggacgacggcctgctgaccctgaccgtggaatccgtcgaaggcagcaggattatcacaagggtggaaaacagccatgtcctgaaaagcaacaaaggcatcaacaaacgcggcggcgggctgtccgcaggcgcgttgaccgaaaaagacttccgcgacctgaaaaccgcgattgccatcggttgcgactacctcgccatcagctttgtgaaatctgccgaagatttgcacatcgcgcgcgccaaagtcgaagaagaaatgaagggcagcactgccgtgcgccccggtttggtttccaaaatcgaacgcgtagaagcgattgaaaaccttgatgaaatcatcctcgccggcgacggcattatggttgcgcgcggcgacttggcggtcgaagtcggacacgccgccgtccccgccctgcaaaaacggatgatccgccgcgcccgcgagttgcgccgcttcagcattacggcgacgcaaatgatggaatcgatgattaccaaccccgtgccgacccgcgcggaagtcagcgatgtggcaaacgcggtattggacggtaccgatgcggtgatgtgttccgccgaaaccgccgtcggcgcgtatccgtttgaaaccgtcagccaaatggcaattatctgcgcggctgcggaaaaagagcaggattcgctcaacggcgttgccgaacaggcggagtatcccgaagcggtcagcaccaacctagcggttgccggcggcgcggtcagcgtggcgcgcgcggttcacgccaaagcgattgtcgccctgaccgaaagcggttcgaccgcctttgaaatcagccgccacaacatcaccctgccgattttcgcgctgaccccgagcgtttccgcccaacgccgtatggcgatgtaccgcggcgtgcgcccgctgattttggcaaccagtaccgaccacgacacggcgttgaacgaagtcgaaaccatgctggtggaacacaacatcctgcattccggcgaccaatacatcatcaccagcggctcgcaaatgcgcgaatccggttcgaccaatacgctggaagtgctgcgcgtcaaataa

SEQ ID NO: 69285 - DNA, 321 bp, Neisseria meningitidis; identical to SEQ ID NO: 41793

SEQ ID NO: 69286 - DNA, 642 bp, Neisseria meningitidis; identical to SEQ ID NO: 60672

SEQ ID NO: 69287 - DNA, 657 bp, Neisseria meningitidis; identical to SEQ ID NO: 55760

SEQ ID NO: 69288 - DNA, 996 bp, Neisseria meningitidis; identical to SEQ ID NO: 61262

SEQ ID NO: 69289 - DNA, 465 bp, Neisseria meningitidis; identical to SEQ ID NO: 55136

SEQ ID NO: 69290 - DNA, 417 bp, Neisseria meningitidis; identical to SEQ ID NO: 39888

SEQ ID NO: 69291 - DNA, 1467 bp, Neisseria meningitidis; identical to SEQ ID NO: 43542

SEQ ID NO: 69292 - DNA, 648 bp, Neisseria meningitidis; identical to SEQ ID NO: 38905

SEQ ID NO: 69293 - DNA, 195 bp, Neisseria meningitidis; identical to SEQ ID NO: 38181

SEQ ID NO: 69294 - DNA, 867 bp, Neisseria meningitidis; identical to SEQ ID NO: 54482

SEQ ID NO: 69295 - DNA, 324 bp, Neisseria meningitidis
ttggtcgaaggtcaaaaatcagccgtcacagagtattacctgaatcacggcgaatggcccgccaacaacagttctgccggcgtggcaacctccgcctccgacatcaaaggcaaatatgttcaaagcgttgaagtcaaaaacggcgtcattaccgccacaatgctttcaagcggcgtaaacaacgaaatcaaaggcaaaaaactctccctgtgggccacgcgtcaagacggttcggtaaaatggttctgcggacagccggttacgcgcgacgccgccaccgacaagaaaatcgacaccaaactagagaaaccgttttcccgataa

SEQ ID NO: 69296 - DNA, 1479 bp, Neisseria meningitidis; identical to SEQ ID NO: 55409

SEQ ID NO: 69297 - DNA, 342 bp, Neisseria meningitidis; identical to SEQ ID NO: 55024

SEQ ID NO: 69298 - DNA, 1113 bp, Neisseria meningitidis; identical to SEQ ID NO: 61675

SEQ ID NO: 69299 - DNA, 222 bp, Neisseria meningitidis; identical to SEQ ID NO: 50201

SEQ ID NO: 69300 - DNA, 930 bp, Neisseria meningitidis; identical to SEQ ID NO: 60845

SEQ ID NO: 69301 - DNA, 240 bp, Neisseria meningitidis; identical to SEQ ID NO: 39582

SEQ ID NO: 69302 - DNA, 774 bp, Neisseria meningitidis
atgtatcgccaaatcggaatgtgggatcaaaaatgggtcatcggcaactggaaaatgaacggccggctccaaaacaacaacgcactgatgcaccgcttccgcatcctccccaccgccgaacgcgtcctcatcggactcgccgccccgaccgtttacctgctgcaactgcacaacgccatgcaaatcgtcttaaacaaccgcatcctcacctgcgcccaagacgtgagccgcttccccgacaacggcgcgtacaccggcgaagtgtccgccgaaatgctcgccgacaccggcacagacatcgtcctcatcggacactccgaacgcagcctttatttcggcgaaaaaaacgaaatccaacgccgcaaaatggaaaacgtcctcaacgtcggactcatcccgttattgtgcgtcggcgaaagcctcgaagagcgcgaagccggcaaagaacacgaagtcatcgcccatcagctttccatcctccaaggactggacaccaaaaacatcgccgtcgcctacgaacccgtctgggcaatcggcaccggcaaagtcgccaccgtcgaacagattgccgatatgcacgcattcatctacaaagaaatcttgtctttgtgcggaagcgatgttaaaatccgtgtcctttacggcggaagtgtgaaagcggacaacgcggccgacatcttcgcagtaccttatgtggacggcgcactcgtcggcggcgcgtcattgtcgtacgactcctttaccgccatcatcagtgccgcacaaaatgcgtag

SEQ ID NO: 69303 - DNA, 654 bp, Neisseria meningitidis; identical to SEQ ID NO: 64373

SEQ ID NO: 69304 - DNA, 756 bp, Neisseria meningitidis; identical to SEQ ID NO: 51882

SEQ ID NO: 69305 - DNA, 1302 bp, Neisseria meningitidis
atgccgtctgaaaccgcccgccccctttatgcggacacgtgcgccgcacacacgctcgtctggttccgccaaaacctccgcatccgcgacaacgccgccttatgcaccgccgttgccgaaggtttgcccgttatcggtatttggattgacgatgccgaaacagacaaccctcgccgcgccgcgttctaccgccaatccgccgccgaactcgcccaagggcttgcagggcgcggcatcccgctctacacggcggcatcgcctgccgagctcgtccggctcgccgtccgcctcaatatccgcgccgtcatcgccgacgaatcccatacttttgccgacaaactcgccgacaacgccctttggcatgaattggacaaacacggcatcgcgttaaccttcgtcaatgaccgcgccgttttcggcaaaaccgacctgatacccgacggcggcacggcacacaccgatttcgaccgctaccgcgaagtatggctcgaccgcttttccaagcagccccccgccggtccggacctattcgcggcataccgccaacccttccccgaaaacctttccgccccgccgcctgccgccctttcagacggcatcttcctgccgcaaaacagcggcgaaacggcggcttggcggcagtggcggcggtttctcgaacaggcggattcctactccgttttaaaggatttcccctcgcgcaaacacacttcgctgatgggcgcgtatttgagtgccggctgcatctcgccgcgcctgctcgcgcgggaaagcctcgaacgccgtctgaacgcgtgggcggacaacatcatccgccgcgattttttccttcaacttgccttgcagcacacggatgacgacccttcagacggcaatcctgaacacaccctgcgcctgacgctttggcagcagggccagaccggcattccgattatcgatgccgcgatgcgctgtttgcacaaaaccggcagcctccaccccgccctgagacgcttgagcgcggattttttctgccacgttttaaacctcccccgccgcgaaggcgagatatggtttgcccgacagctgaccgatttcgatgcggcaatcaaccaaggcaactggtggcttgccgcctcacggcacacctgccccgacattgccgccgcctcataccgtaccgacccggacggtacttttatcaaacggcacattcccgaactcgcccacctgtccgccgacaccgtccacacgccttggcggtttgcctgttcggtcgatacccacggctatcccgcctatcctgtcgccggtattccctaa

SEQ ID NO: 69306 - DNA, 1749 bp, Neisseria meningitidis; identical to SEQ ID NO: 54378

SEQ ID NO: 69307 - DNA, 729 bp, Neisseria meningitidis
atgggagggaaaatgtccgacaaaaaatataatgtcgatgagggggaaatcgccaaattcagccggattgccgacaaatggtgggacaagtcgggcgagttcaaaaccttgcacgacatcaatccgctgcggctggattatatcgacgggcacgcggatttgtgcggcaaacgggttttggacgtgggctgcggcggcggcatcttggcggaaagtatggcacggcgcggcgcggcgtttgtaaagggcatcgacatggcggagcagtcgttggaaaccgcccgcctgcacgcggctttgaacaatgtcgccgatatcgaatacgaatgtatccgcgtggaagaccttgccgaggcggaaccgcactcgttcgatgtggtaacgtgcatggaaatgatggaacacgtccccgatcccgccgccatcgtgcgtgcttgtgccaagctggtcaagccggacggcatggtgtttttttccaccatcaataaaaacccgaaatcgtacctgcatctgattgtggcggcggaatatctgttgaagtttgtccccaaaggcacgcacgactggaaaaaattcatcgcacctgccgagctggcgcgaatgtgccgtcaggcaggcttggatgtggcggatacgaagggtatgacttaccatgtgttgtcgcaaacttatgccctgtgcgattcgaccgatgtgaattatatgtttgcctgccgtccggcgttctga

SEQ ID NO: 69308 - DNA, 231 bp, Neisseria meningitidis; identical to SEQ ID NO: 39231

SEQ ID NO: 69309 - DNA, 513 bp, Neisseria meningitidis; identical to SEQ ID NO: 40766

SEQ ID NO: 69310 - DNA, 1011 bp, Neisseria meningitidis; identical to SEQ ID NO: 55225

SEQ ID NO: 69311 - DNA, 351 bp, Neisseria meningitidis
atggagaatgtgatgaaaaaaatcgaggcgattgtcaaaccgttcaaactcgacgacgtgcgcgaggcgttgacggaaatcggcattacgggcatgaccgtcagcgaggtcaaagggttcggcaggcagaaggggcatacggaaatctatcgcggtgcggaatacgccgtcgatttcctgcccaaagtcaaaatcgagctggtgttggcggatgatgctgtggaacgcgcgattgacgtgattgtcgaggtggcgcgttcgggaaaaatcggcgacggcaagatttttgtgctgccggtcgaggaggcaatccgtatccgcacgggcgaacgtgcggacgcggcggtttga

SEQ ID NO: 69312 - DNA, 207 bp, Neisseria meningitidis
atggcacgtattaccaccgaagactgtaccggaaaaatttccaaccattttgacctgacattggtagcggcccgtcgggcccgccagcttgaaaatggcaatacgccgcttgtggacgatgtccgcaataacaaaccgaccgttaccgccttaagggaaatcgccgccggacatatcggtacagaactgttgacgcgcaataaataa

SEQ ID NO: 69313 - DNA, 582 bp, Neisseria meningitidis; identical to SEQ ID NO: 37500

SEQ ID NO: 69314 - DNA, 840 bp, Neisseria meningitidis; identical to SEQ ID NO: 44765

SEQ ID NO: 69315 - DNA, 1170 bp, Neisseria meningitidis; identical to SEQ ID NO: 62066

SEQ ID NO: 69316 - DNA, 318 bp, Neisseria meningitidis; identical to SEQ ID NO: 54948

SEQ ID NO: 69317 - DNA, 1257 bp, Neisseria meningitidis; identical to SEQ ID NO: 55939

SEQ ID NO: 69318 - DNA, 756 bp, Neisseria meningitidis; identical to SEQ ID NO: 54580

SEQ ID NO: 69319 - DNA, 501 bp, Neisseria meningitidis; identical to SEQ ID NO: 41232

SEQ ID NO: 69320 - DNA, 876 bp, Neisseria meningitidis; identical to SEQ ID NO: 54814

SEQ ID NO: 69321 - DNA, 465 bp, Neisseria meningitidis; identical to SEQ ID NO: 49248

SEQ ID NO: 69322 - DNA, 870 bp, Neisseria meningitidis
atgaaaccgataaaaaaagccgtcttccccgtcgcagggatgggaacacgcttcctgcccgccaccaaggcaagcccgaaagaaatgctgcccatcgtcgacaagccgctgatccaatacgccgtagaagaagccgtggaagccggctgcacggaaatggtgtttgttaccggacgcaacaaacgcagcatcgaagaccatttcgacaaggcatacgaactcgaaaccgagttggaaatgcgccataaagacaaattgttggaacacgtccgcaacatcctgccgccgaacattacctgcctctacatccgtcaggcggaagcactgggcttgggacacgccgtcttgtgcgcccgcgccgccatcggagacgaaccctttgccgttatccttgccgacgacctgattgatgcccccaaaggcgcgctcaaacaaatggtcgaagtgtacgggcgcagcggcaacagcattttgggcgtagaaaccgttgaagcatcgcaaaccggctcatacggcatcgtcgaaaccgaacagctcaaacagttccaacgcattatcggcattgtcgaaaaacccaagcccgaagacgcgccctccaaccttgccgtcgtcggacgctacatccttaccccgcgcattttcgacttactgaccggactgccgcgcggcgcgggcaacgaaatccagcttacagacggcatcgccaagctgctcgatcacgaatttgtcctggcgcacccctttgaaggcacgcgctacgactgcggcagcaaactgggctacctcgaagccaccgtcgcctacggcctgaaacaccccgaaaccggcgaacccttccgccgccttttggaaaaataccgcaccgaataa

SEQ ID NO: 69323 - DNA, 324 bp, Neisseria meningitidis; identical to SEQ ID NO: 38702

SEQ ID NO: 69324 - DNA, 324 bp, Neisseria meningitidis; identical to SEQ ID NO: 38645

SEQ ID NO: 69325 - DNA, 1437 bp, Neisseria meningitidis
ttggaaaactcattaattatcggtttggcactggcggtattgctgatgcttttggttatgcgtgcgaagcagggtaagaaaacaccgaagcgcaaatcccaaggtgtcggcaatacgcaggggcagacacccggaagcaatgattcggactgggtcgatcagattggacaatcggtttcagacggcacgcaacccgactggtcttggaacgaaagtgccgagaccgcatccgccgccgtatccgcgcaagaagtcgatccgcttacggagtatcaggtttataagcaattcggttatcagggcaaggctgccgaatctttggctgcctatctggacggcattccggatggtgaagcgaaacctgaaaaccttatccgcgagctgctcgatatcaatctcgaagtgggggatgtcgatgttttggcagacaatctgcaaaaatacggcaaactgattccttccgaacttttggcaaaatatatcgaacaggcattacagcgcgattcaaaccatttgcgtatccgtgtcttggcggaagaaggtttgggatggggcactcaggagattgaaaaacgtgcggaaggcggttctgcgacggcagcttccgcatcgcccccgccggatgccggcggtaaggcttatgaagccgaagaaatcaagcgcatcccgattgtgcggggcaaaaaagacgtgtccggaatcagtcaagaggaaatcggtgcgattgccggtttggttcgcgccgatcaaggtgcgaaaatccttaaagacaaagtcagctatgaaacggcatcgaaacaatacgaccgtgccatccaaacttccgaaaaacctgcaaacctgattatcgatgcgttgaaactcgattaccaacacgcggacatagaccgttttgccggacatttgtggaaactttaccaaacgttgggtaactacggcaggcaggttaaagagcggatgctggggtgggggtacagcttgggttaccatgaagttttcgatgatttggaaaaagggccgaacgaccggcaaatcaaagacatcggtatggggcacgggtatctgccgaaaaatatacagaaattcaaatcgcaacatcgggatttggtgcttcaagattcttcgttgatcaacaccggttcgtctccggcagacgatgcggttaaggaagtagagtcgttgctgatgtatggtcagattgaagcggcaatggatgtgttggagcaggcggtattgaaatatcccgacgagtcccagctttatattacgttgatcgatatttatgaacgtactgaagattgggataggttggggcagtttttaagggtattgagggaacgtgcggacaggcttcctgaagaggtcgttatgctgatgagccggctgctgcagcgtatgaatcaaaatattaaaaaaataaaacggtacggaaaataa

SEQ ID NO: 69326 - DNA, 1227 bp, Neisseria meningitidis; identical to SEQ ID NO: 55763

SEQ ID NO: 69327 - DNA, 4170 bp, Neisseria meningitidis; identical to SEQ ID NO: 61767

SEQ ID NO: 69328 - DNA, 240 bp, Neisseria meningitidis; identical to SEQ ID NO: 62049

SEQ ID NO: 69329 - DNA, 477 bp, Neisseria meningitidis; identical to SEQ ID NO: 61478

SEQ ID NO: 69330 - DNA, 1587 bp, Neisseria meningitidis; identical to SEQ ID NO: 61059

SEQ ID NO: 69331 - DNA, 2286 bp, Neisseria meningitidis; identical to SEQ ID NO: 55500

SEQ ID NO: 69332 - DNA, 462 bp, Neisseria meningitidis; identical to SEQ ID NO: 55947

SEQ ID NO: 69333 - DNA, 2190 bp, Neisseria meningitidis
atgatctaccaccgtatcgccgtaaacgtgccgctttcagacggtcttttaacttattcccattccgagccgctgccgcagggaatgcgggtgcttgtgccttttcgcaataaaaccgtggtcgggatggtgtgggaaacggatattgcgccggatatggatacggcgcggattttgagtattcagacgacctttttagacgagccgccgttgcctgaaagctggcgtgatttgctctcgtttacgtcgcgttattaccactatccgacggggcaggcggtgtttgccgcgctgccgcagggtttgaaggaaacgcgcgcggtggaaatgccgcagccgccgttgttttacgcgctgaacgaagcgggcagggcgcaaacgccgccgccggcgcggttcaacaaaaaagcggctttgtgggacgcgctgctgtcgggcgaaatgacgatggcagcgttgaagcaggtaaacgcgcaggcggtgaaattaatcgaaaattgggcggaacagggttggattgaaacgacggaagcggcgaagcccgttttaaggtcgtgtaatgggcaggcttcgcactctgaatttgtattaaatgctgaccagcagaaggcttccgatgccattcagacggcattgggacgcttccagccgtttctgctgtacggcatcaccggcagcggcaagaccgaggtgtattttgatgcgatggcgaaagtgttggctcaggggcggcaggtgttgtttctgttgcccgaaatcaacctcacgccgcagcttttgaagcgggtagaaaaccgttttgccgacgtgccgaccgccgtgttgcacagccagatggcggcaggcaggcgcacgcaagattatttgcgcgcgatgttggggcaggcgaaattagtcatcggcacgcggctggcggtgttcacgccgatggatgatgtcgggctgattgtggtcgatgaggaacacgacggctcgttcaaacaagacaacgaattacgctaccacgcccgcgatttggcggtgtggcgggcgaagcagagcggctgccccgtcgtgctgggtagcgccacgcccagcttggagagctggcacaaggtgcaaagcggcgcgtaccgcctgctgcaactgaccgagcgcgcccataccgctgcgcaactgccgcaagtggacatcctcaacgtaggccgtctgaaactagacaatggcttctcgccgcaagccttgcagcttttgaaacagaattttgaagcgggcggtatgtcgctggtgtacctcaaccgtcgcggcttcgcgcccgcgctgttttgcggcgactgcggccataccttcggctgcccgaactgctccgccaaaatggtgctgcaccaacgcgtccgccaactgcgctgccaccactgcgaccaccgcgaacccataccgttcaaatgccccgactgcggaaatcaagacctgaccgccgtcggacacggcacgcagcgcgtcgaagaaaccctgcgcgccttcctgcccaaggcagccgtcgtccgcgtggacagggacagcaccgcgcacaaaaacgactgggcggatttgtaccgccgcatcgccgacaacgaaatcgacattctggtcggcacgcagatgctcgccaaaggccatgactttgcgcggctcaacctcgttatcgtattgaacgccgacggcagcctttacagcgcggatttccgcgcgccggaaagactgttcgccgagctgatgcaggtgtccggcagggcggggcgcgccgacaaacccggcaaggtgttgatacagacccaactgcccgaacatcccgtcttcgccgccgtcaaagcgcaggattatgccgtgtttgccgaaaacgaattgaacgaacggcaaatgttcgccatgccgcccttcggttttcagaccgccgtccgcgcggacgcgccgcgtgttgccgatgcgctggaatttctcaatgccgccaaagaaaccctcgccccgctgttgcccgcaagcgtttcccagtttggcgccgcccccatgctgatggtgcgcctcgccgaacgcgaacgcgcgcaaatcttcctcgaatccccgtcccgacaggatttgcaccgtgccgtgagtttgtgggtgcaggtgttgcagcaaaaccgcgacggcaaaattagatggtcggtggatgtcgatccgcaggaggcttga

SEQ ID NO: 69334 - DNA, 795 bp, Neisseria meningitidis; identical to SEQ ID NO: 61479

SEQ ID NO: 69335 - DNA, 393 bp, Neisseria meningitidis; identical to SEQ ID NO: 40523

SEQ ID NO: 69336 - DNA, 1335 bp, Neisseria meningitidis; identical to SEQ ID NO: 54609

SEQ ID NO: 69337 - DNA, 303 bp, Neisseria meningitidis; identical to SEQ ID NO: 39628

SEQ ID NO: 69338 - DNA, 957 bp, Neisseria meningitidis; identical to SEQ ID NO: 54437

SEQ ID NO: 69339 - DNA, 665 bp, Neisseria meningitidis
atgaagataacgcactgcaaattaaagaaaaaagtacagaaagaactgctccgtttttttgtgctggaagttaccgcccgttctgccgccgatattttgggtatccatcccaattcggcagcactgttctaccgtaaaatccgcacggttatcaaccatcatttggccctggctgccgatgaggtttttgagggccctgtcgagccggacgaaagcgatttcggcggacggcgtaaaggcagacgtggtcgcggtgcggcaggaaaagtggttgtcttcggcattctgaaacgtaacggacgggtctataccgttgtcgtagataatgccaagtccgatactttaatgcctgttatcaaacagaaaatcatgccggacagcattgtttataccgacagcctgagcagttacgacaagttggacgtaagcggttttatccattaccgcatcaaccattccaaggaatttgctgaccgtcagaaccacataaacggcattgagaacttttggaatcaggcaaaacgcgtcttgcgaaaatacaacggaatcgattgcaaatctttcccgctgttcttgaaagaatgcgaatttcgatttaacttcggcacaccgtctcaacagcttaaaatcctgcgggattggtgtggaatttagggctaatctag

SEQ ID NO: 69340 - DNA, 1284 bp, Neisseria meningitidis; identical to SEQ ID NO: 60781

SEQ ID NO: 69341 - DNA, 471 bp, Neisseria meningitidis; identical to SEQ ID NO: 54820

SEQ ID NO: 69342 - DNA, 777 bp, Neisseria meningitidis; identical to SEQ ID NO: 42565

SEQ ID NO: 69343 - DNA, 216 bp, Neisseria meningitidis; identical to SEQ ID NO: 53765

SEQ ID NO: 69344 - DNA, 144 bp, Neisseria meningitidis
atgtgcaaaccaaaccgaaaatgcgaaataccgtctgaaaatctttcagacggtatttactgtctttattgccgtttttcttccgtatccggatttttgtttggggctgagcagattggcagtcagattgcaatcgaagaatga

SEQ ID NO: 69345 - DNA, 2595 bp, Neisseria meningitidis; identical to SEQ ID NO: 60994

SEQ ID NO: 69346 - DNA, 402 bp, Neisseria meningitidis; identical to SEQ ID NO: 40533

SEQ ID NO: 69347 - DNA, 291 bp, Neisseria meningitidis; identical to SEQ ID NO: 54697

SEQ ID NO: 69348 - DNA, 1173 bp, Neisseria meningitidis; identical to SEQ ID NO: 55592

SEQ ID NO: 69349 - DNA, 918 bp, Neisseria meningitidis; identical to SEQ ID NO: 50851

SEQ ID NO: 69350 - DNA, 564 bp, Neisseria meningitidis
atgccttggaatctccccatcttcctcacatggttgagggtcttgctcattcctgtcatgacagcccttttttacctgccttttccgtggttcgcggaggaaacgattaatctcaccgccgccgtcatttttgccgttgccgccttaaccgactggtttgacggatttttggcaagactgtggaaacagacttccgatttcggcgccttcctcgatcccgtcgccgacaagctgatggttgccgtatcgctacttttactggtcaaactcgaccggacctatgttttgtttgccatgatcattatcggcagggaaattaccatttccgcattgcgcgaatggatggcgcaaatgggcaaaaggaacagcgttgccgtcgccaccgtcggtaagtttaaaaccgccgcgcaaatgctggcaattttcctgctgctgctgaatattcccgatttttacggatttaatcttgttgttatcggcaatgtattgatgtttatcgcatctttgctgacagtctggtcgatgctgtattatctgaaaatggcgtggaaagaaatcgcctga

SEQ ID NO: 69351 - DNA, 408 bp, Neisseria meningitidis; identical to SEQ ID NO: 55717

SEQ ID NO: 69352 - DNA, 402 bp, Neisseria meningitidis; identical to SEQ ID NO: 55449

SEQ ID NO: 69353 - DNA, 471 bp, Neisseria meningitidis; identical to SEQ ID NO: 62004

SEQ ID NO: 69354 - DNA, 2451 bp, Neisseria meningitidis
gtgagcattagcgcaccgtatgccaatgagaacagtcgcatcctgctcagcaccacggatatcagttcggaaaacggcaaaatcaaaattcaatcttacggtgaccaatattactatgcgagacagagcgaactctatacctttgaacgccgcagctacaaaactggcaaatggtacaaccgcaaacacattaccgaagtcaaagaacacaaaaacgccaagcccgacgcagtaaacctcagcgcatcccaaggcatcgacatcaaatctggtggcagcatcgacgcctacgccaccgcattcgatgcccccaaaggcagcattaacatcgaagccgggcggaaattgacactctatgccgtagaagagctcaactacgacaaactagacagccaaaaaaggcgcagatttctcggcatcagctacagcaaagcacacgacaccaccacccaagtcatgaaaaccgcgctgccctcaagggtagttgcagaatctgccaatctgcaatcaggttgggataccaaactgcaaggcacacagtttgaaaccacactgggtggcgcaaccatacgcgcaggcgtaggtgagcaggcacgggcagatgccaagattatcctcgaaggcatcaaaaccacgatccacaacgaaaccgtgagcagcagcaaatctgctctatggcaaaaacaggcaggacggggcagtaacatcgaaaccttgcaattgccgagtttcaccggtcccgttgcgcccgtactgtccgcacccggcggctatatcgccgacatccccaaaggcaacctcaaaaccgaaatcgaaaaactcgccaaacagcccgagtatgcttatttaaaacagcttcaagttgcgaaaaacatcaactggaatcaggtgcagcttgcttacgataaatgggactacaaacaggagggcatgacacccgcagcagcagctgtcgtcgttatcgtcgtaactgtattgacctacggcgcactgtccgccccggcagccgccggaacggcgggcgcggcaggcgcaggagcgggaggagccgcagcaggaacggcagccggaactggagtagcagcaggaacggcagccacaaccggagtagcagcaggcacatcagctgcagctatcaccacagccgcaggcaaagccgcactggccagtctcgccagccaagccgcagtttccctcatcaacaacaaaggagacataaaccataccctgaaagaactgggcaaaagcagcaccgtcagacaggccgccaccgccgccgtaaccgcaggcgtactgcagggcataagcgggctgaacacccaagcagccgaagccgtcagcaaacattttcacagtcccgcagcaggcaaactgaccgctaacctgatcaacagcaccgctgccgcaagtgtccataccgccatcaacggcggcagcctaaaagacaacttgggcgatgccgcactgggtgcgatagtcagtaccgtacacggagaagtagcgagcaaaatcaaatttaatctcagcgaagactacattgcccacaagatagcccatgccgtagcaggctgtgcatcggcggtagcaaataaaggcaaatgtcgggacggcgcaatcggcgcggcagtcggcgagatggtgggagaaaccctgttggacggacgcgatgtaggcaaactgtcaccccaagaacgccaaaaagtcatagcctactcgcagattatcgcaggcagcgtagtggcattggttaaaggggatgtgaatacggcggcgaatgcggctactgtggcagtggagaataatagtcttttagctcgcaggagggtaaatatacgttggactccgcgacaagaattggaacatgaatatgccattcttgaaatccaggccattaccaatcaaatccgaaggctggatccgaaatttaacgggattgctattctgaggactcctggagagccgtggacaagacatgatgtacaaacatacaggcaatattataatcaattaagggaatccagaggctttgctgttgacccaatttatagaatcaggataaacaacggcaatgaatttaaccgtatcatgtcatcaaaatacccttataatgagctttatgtagccaatcctaaatcggcgacggggtattttagggtagattcgtataatcctgcgacagaggaaattatttcaagaaaatttacccaattttctcaaatccaagaaagtacggggattggttatatcaaggaggctgttagaaaatatagccctggtgctgtcatttccaatgttccaagtacacctactacgataagaggaagaaagcttgaaggaaaacttattttagaagttcctgctcaggtcaatccaattccacaatctgtattaagggcggcacaagaagaaaatgttatcattagagatacaacaggaaggatttacaaatga

SEQ ID NO: 69355 - DNA, 1137 bp, Neisseria meningitidis; identical to SEQ ID NO: 55697

SEQ ID NO: 69356 - DNA, 801 bp, Neisseria meningitidis; identical to SEQ ID NO: 61748

SEQ ID NO: 69357 - DNA, 1335 bp, Neisseria meningitidis; identical to SEQ ID NO: 61516

SEQ ID NO: 69358 - DNA, 417 bp, Neisseria meningitidis; identical to SEQ ID NO: 51640

SEQ ID NO: 69359 - DNA, 375 bp, Neisseria meningitidis; identical to SEQ ID NO: 55878

SEQ ID NO: 69360 - DNA, 324 bp, Neisseria meningitidis; identical to SEQ ID NO: 60702

SEQ ID NO: 69361 - DNA, 234 bp, Neisseria meningitidis; identical to SEQ ID NO: 50280

SEQ ID NO: 69362 - DNA, 1509 bp, Neisseria meningitidis; identical to SEQ ID NO: 61346

SEQ ID NO: 69363 - DNA, 2187 bp, Neisseria meningitidis
ttgccccgatgcctgaaacaggctgtccgccacgtcatgccgtctgaaaccggcgcagatgccgccaagccttcagacggcattgcctgcccgctccgaccgaacaacaaccatctttgggagaaccttatgcccgaacaaaaccgcatcctctgccgcgaactaagcctgctggcattcaaccgccgcgtgttggcacaggcggaagacaaaaacgtcccccttttggaacgcctgcgcttcctgtgcatcgtgtcgtccaatcttgacgagtttttcgaagtccgcatggcgtggctcaagcgtgaaaacaagctgcacccccggcgcaggctggacaacggcaaaatgccgtctgaaaccatcgccgacgttaccgaagcggcgcgctccctgatacggcaccagtacgacctgttcaacaacgtccttcagcccgagttggcgcgggaaagcatccatttttaccgccgccgcaactggacgggcgcgcagaaaaaatggatcgaagactatttcgaccgcgaactgctgccgatcctgacccccatcggactcgacccgtcccaccccttcccgcgaccgctgaacaaatcgctcaacttcgccgtcgaactcgacggcacggacgcgttcggcaggccttcggggatggcgattgtgcaggcaccgcgcatcctgccgcgcgttgttcccctgccgtccgaactgtgtggcggcggacacggcttcgtcttcctctcctccatcctgcacgcccacgtcggcaaactcttcccgggcatgaacgtcaaaggctgccaccagttccgcctgacgcgcgacagcgacttgaacgtcgatgaagaagacgtgcaaaacctccgcgccgccgttcaaaacgagttgcacgaccgcgaatacggcgacggcgtgcgcctcgaagtcgccgacacctgtcccgcccgcatccgcgacttcctgctgtcgcaattcaggctgaccgccgacgaactttaccaagtcaaaggccccgtgaacctcgtgcgcctcaacgccgtccccgatttggtcaaccgccccgatttgaaattcccgccgcacacgccgggcaggctgaaagccttgggcaaaaccgcgtccatattcgatttggtgcgccaatcgcccatcctgctgcaccacccctaccaatccttcgaccccgttgtcgaaatgatgcgcgaagccgccgccgaccccgccgtgcttgccgtcaaaatgacgatttaccgcaccggcacgcgctccgaactcgtccgcgccctgatgaaggcggcactcgccggcaaacaagtaaccgtcgtcgtcgaactgatggcgcgttttgacgaagccaacaacgtcaactgggcgaagcagctcgaagaggcgggcgcgcacgtcgtgtacggcgtgttcggctacaaaatccacgccaagatggcactggtcatccgccgcgaagacggcgtgctcaagcgttacgcccacctcggcacgggcaactaccaccaaggcacatcgcgcatctacaccgacttcggcatcattaccgccgacgaacaaatcaccgccgatgtgaacacattgtttatggaaatcacaggtttgggcaaacccggccgtctgaacaagctctatcaaagcccgtttaccctgcacaaaatggttatcggacgcatcaggcaggaaaccgaacacgccaaagcaggcaagccggcacggattactgccaagatgaattcgctcatcgaaccgaccgtcatcgaagccctgtatcgggcaagcgcggcaggcgtgcaaatcgatttgattgtgcgcggtatgtgcactctgcgccccggcgtgaaaggcttgtccgaaaacatccgcgtccgctccatcgtcggcaggcagctcgaacacgcgcgcgtgtattgcttccacaacaacggcgcggacgatacctttatttccagcgcggattggatggggcgcaacttcttccgccgcatcgaaaccgccgcgccgattaccgcgcccgaactcaaaaaacgcgtgatccgcgaaggtttggaaatggcattggcagacaacacccacgcctggctgatgcagcccgacggcggctatatccgcgccgcgcctgccgagggcgaaagcgaagccgacctgcaaaacgatttgtggacactgctcggaggctga

SEQ ID NO: 69364 - DNA, 246 bp, Neisseria meningitidis; identical to SEQ ID NO: 39751

SEQ ID NO: 69365 - DNA, 1056 bp, Neisseria meningitidis; identical to SEQ ID NO: 55146

SEQ ID NO: 69366 - DNA, 375 bp, Neisseria meningitidis; identical to SEQ ID NO: 46249

SEQ ID NO: 69367 - DNA, 1902 bp, Neisseria meningitidis; identical to SEQ ID NO: 60385

SEQ ID NO: 69368 - DNA, 1011 bp, Neisseria meningitidis; identical to SEQ ID NO: 61790

SEQ ID NO: 69369 - DNA, 1380 bp, Neisseria meningitidis
atgcagcatctgactgaaagaatgactcaaattgccaagctgctgaattcttccgcaaacaatcctgatatagacattcccgattttcttactgaaatcaaagattattcagaattttccgtgacagatgaaaatggaacctacctgcattgggacaaattccgccagattcacacggaagatacgcggatgaaatggcgcgccgttaaggaaagccgcaaaaaaatccaaaaaccaattgatttcccgtttgaacatcagttttggttctgcattcccgactctttgcaggcacggcttcatttgattgacaaaagctgcggcagttctatcggcacgtctagcttgggtggcttcggcagaagcgagcaaaacagattcttgctcaagtctctgattatggaagaagcgattacatccgcccaactggaaggtgcggctaccacgcgtaaagtggccaaggatatgctcaaatcgcagcgtaaacccaaaacaaaagacgaaatcatgatagtgaacaactatcacttgatgaaaaaagcggtagaattgaaaaatacgccgttaagtgttgaaatgattttggatttgcaccgcattgctaccagcaacgctattgaaaacaaggccgaccccgggcaattcaggcgggacgacgaaatctttatcgccgataacgacggcaacagcctgtaccaaccaccgccacacgggcaggttcatacgctgatggaagcggtatgcacgtttgccaacaacacttatgacggcgtggaaaatccgtttatccatccggttgtccaagctatcatcctgcatttcctgattggctacatccatccgttcggagatggcaacgggcggatagcgcgggctttgttctattggtttatgctcaaaaacagctactggctgtttgaatacatatcaatcagccgtcttctgaaaaacgctccggcccaatacgccaaatcctatttgtatgcggaaactgacgattcagatttaacctatttcatctattaccaatgcgatattatcaagcgggcggttgccgatttggagcactacatttccgacaaacaaaaacaccaacaggaattcaaagcagcgattgcccaatatactgaaaagataggaaagttgaaccaacggcaaattggtatcctgcaaaaagcagtggaagaaagcggaaaaatctttactgcactagaaattgccaaccaatacggcatctccctgaatactgcccgtagcgatttgagcaaactgggagaatatagattcctagtaccgttcaaatcaggaaatgctttagagtatgttgctcctcaggatttattggaaaggttagaaaaaaaaaatagtttgctagcctaa

SEQ ID NO: 69370 - DNA, 627 bp, Neisseria meningitidis; identical to SEQ ID NO: 60839

SEQ ID NO: 69371 - DNA, 834 bp, Neisseria meningitidis; identical to SEQ ID NO: 61279

SEQ ID NO: 69372 - DNA, 465 bp, Neisseria meningitidis; identical to SEQ ID NO: 55305

SEQ ID NO: 69373 - DNA, 627 bp, Neisseria meningitidis; identical to SEQ ID NO: 62171

SEQ ID NO: 69374 - DNA, 759 bp, Neisseria meningitidis; identical to SEQ ID NO: 61993

SEQ ID NO: 69375 - DNA, 975 bp, Neisseria meningitidis
atgacagaatatcccggcatcgggtcgccgttgttttacggcgttttttttgcggcagtgctggtcatgattgccttggatatgttttcgctgaagaaaaacggcagccataaagtcggcatcaaagaagccttggcatggagcggcttgtgggttgccgtatcctgcctgttcgcgggctggctgtatttcgaactcgccggcaatcccggctacggcgcggcagtcgcaaaagaaaaagtattggaattctttaccggctacattttggaaaaatcgttggcagtcgataatattttcgtgttcctgatgatattcggctacttcaaagtcgcaccgcagtttcagcaccgcgtgctgctgtacggcgtattgggcgcattggtattgcgcaccgtcatgattttcgtcggcgcggcactggttcggcagttcgagtggattctgtatctgttcggcgcgttcctgctctataccggcatacacatgatgaagcccaaaggcgatgagaaagaggatttggcaaacagcaggctgctgaatgccgtcaagaaagtcgttccggtcggcacggaatttcacggcgagaaattttttaccgtcgaaaacggcaaaaaaatcgccacgccgctgtttttggtgctggtcatgattgaattgagcgatgtcgtgtttgccgtggacagtattcccgccgtctttgctgttaccaccgatccgtttatcgtgctgacctccaatattttcgccattttgggtttgcgggcgatgtatttcctgctggcggatgtggcggaacgctttatcttcctgaaatacggcttggcattcgtgttgagttttatcggtgtgaaaatgctggtaatgcattgggtgcatatcccgatttccgtttcgctgtcggtcgtgttcggcgcgttgggtgcatcgatactgacctcgttaatttatacgaaaaaacagcctgataaataa

SEQ ID NO: 69376 - DNA, 1893 bp, Neisseria meningitidis; identical to SEQ ID NO: 60393

SEQ ID NO: 69377 - DNA, 606 bp, Neisseria meningitidis; identical to SEQ ID NO: 51371

SEQ ID NO: 69378 - DNA, 267 bp, Neisseria meningitidis
ttgccttcccgctccgctttgaagacagcagctttagcaggactaccatcaggtaagttatttgcaacttgtttaatcaaagaattctaccgacacatccaaatggccaaaacattgaaggcggaaacctatttttaccgcccttaccattcttgggagaaagggctgaatgaaaacaccaatggactcatccgacaatattccccaaacaaaccgttttccgaaacatcagcgatcgggagatacgtagggttcaagatgagttga

SEQ ID NO: 69379 - DNA, 2115 bp, Neisseria meningitidis; identical to SEQ ID NO: 61810

SEQ ID NO: 69380 - DNA, 639 bp, Neisseria meningitidis; identical to SEQ ID NO: 54751

SEQ ID NO: 69381 - DNA, 1242 bp, Neisseria meningitidis; identical to SEQ ID NO: 37141

SEQ ID NO: 69382 - DNA, 1332 bp, Neisseria meningitidis; identical to SEQ ID NO: 55013

SEQ ID NO: 69383 - DNA, 741 bp, Neisseria meningitidis; identical to SEQ ID NO: 55109

SEQ ID NO: 69384 - DNA, 696 bp, Neisseria meningitidis; identical to SEQ ID NO: 38171

SEQ ID NO: 69385 - DNA, 720 bp, Neisseria meningitidis; identical to SEQ ID NO: 55680

SEQ ID NO: 69386 - DNA, 525 bp, Neisseria meningitidis; identical to SEQ ID NO: 61838

SEQ ID NO: 69387 - DNA, 630 bp, Neisseria meningitidis; identical to SEQ ID NO: 61122

SEQ ID NO: 69388 - DNA, 1470 bp, Neisseria meningitidis
atgccgtctgaagccgatatattccgtgtcggcagtgtttcagacgaaaacggaaggacaaagattatgaaaaaaattcaagcagatgtcgtcgtaatcggcggcggtactgccggtatgggcgcgtttcgcaatgcccgtttacattcggacaatgtttacctgattgaaaacaatgtgttcggcacgacctgcgcgcgcgtgggctgtatgccttccaaactcttgattgccgccgccgaggcgcgccatcacgcattgcataccgacccgttcggcgtgcatttggataaagacagtatcgtcgtcaatggcgaagaagtgatgcagcgcgttaaatccgagcgcgatcgttttgtcggctttgtcgttgccgatgtggaagaatggcctgctgacaaacgcatcatgggttcggctaaatttatcgacgagcataccgtccaaatcgacgaccatacccaaatcacggcaaaaagtttcgtgattgctaccggctcgcgtcccgttatcctgccgcagtggcagtctttgggcgaccgtttgattatcaatgacgacgttttctcatgggatacgctgcctaagagcgttgccgtgttcggaccgggcgttatcggtttggaactggggcaggcattgcaccgtttgggcgtgaaagtcgagattttcggcttgggcggcatcatcggcggcatttccgaccctgtcgtttcagacgaggcgaaagccgtgttcggtgaagaattgaaactgcatctggatgccaaaaccgaggtcaaactcgatgcggacggcaatgtagaagtctattgggagcaagacggcgaaaaaggcgtatttgttgccgaatatatgctggcagccgtaggccgccgtccgaacgttgacaatatcggtttggaaaacatcaatatcgacaaagatgcgcgcggcgtacccgttgccgatccgctgaccatgcagaccagtattccgcatatctttattgcgggcgacgcatccaatcaactgcccctgctgcacgaagctgccgatcaaggcaagattgccggcgacaacgcgggccgctatccgaatatcggcggcggtttgcgccgcagcaccatcggcgtggtgtttaccaatccgcaaattggctttgtcggtttgaaatacgcgcaggttaccgcgcaataccaacccgacgaatttgtcatcggcgaagtatcgtttaaaaaccaaggccgcagccgcgtgatgctggtaaacaaaggccatatgcgcctgtatgccgaaaaagcaaccggccgcttcattggtgcggaaatcgtaggccctgccgccgaacatttggcgcacctgttggcatgggcgcatcaaatgaagatgaccgttccgcaaatgctggatatgccgttctaccatcctgttatcgaggaaggtctgcgtactgcgttgcgtgatgccgatgcgaaattgaaagcctga

SEQ ID NO: 69389 - DNA, 483 bp, Neisseria meningitidis; identical to SEQ ID NO: 61356

SEQ ID NO: 69390 - DNA, 306 bp, Neisseria meningitidis; identical to SEQ ID NO: 43025

SEQ ID NO: 69391 - DNA, 1512 bp, Neisseria meningitidis; identical to SEQ ID NO: 60432

SEQ ID NO: 69392 - DNA, 780 bp, Neisseria meningitidis; identical to SEQ ID NO: 54254

SEQ ID NO: 69393 - DNA, 1413 bp, Neisseria meningitidis; identical to SEQ ID NO: 60958

SEQ ID NO: 69394 - DNA, 417 bp, Neisseria meningitidis
atgcgcttactccatactatgctccgcgtgggtaatctcgaaaaatccctcgatttctaccaaaacgttttgggtatgaaactgctccgccgaaaagattatcccgaaggcagatttacccttgccttcgtcggttacggcgatgaaaccgacagcacggttttggaactgacgcacaactgggatacggaacgatacgacttgggcaacgcctacggacacatcgcggttgaagtggatgatgcctacgaagcctgcgaacgtgtgaagcggcagggcggaaacgtcgtccgcgaagccggcccgatgaaacacggcacaaccgtgatagccttcgtcgaagaccccgacggatacaaaatcgaattcattcaaaagaaaagcggtgacgattcggttgcctatcaaactgcctga

SEQ ID NO: 69395 - DNA, 579 bp, Neisseria meningitidis; identical to SEQ ID NO: 62807

SEQ ID NO: 69396 - DNA, 297 bp, Neisseria meningitidis
atgcggatggcagaaagtaaaagggtacaacggctattgagggtctttatcgcgcttgacgaacatccgattatcggtctgagcaataaggatttatcggtcggactggggctgacgccatcacaagtcagcagggatattgatgatttggttgcatcgggattggtcatcaagcttgaaaacggcaactacgcctacggtatcaaaaccctgcaaatcgccgagcggttcaggcggcagcatgaacggctgcaaagcaagattgccgaaatcggcaagcgggtgaatgcagattaa

SEQ ID NO: 69397 - DNA, 228 bp, Neisseria meningitidis; identical to SEQ ID NO: 44482

SEQ ID NO: 69398 - DNA, 966 bp, Neisseria meningitidis; identical to SEQ ID NO: 60806

SEQ ID NO: 69399 - DNA, 321 bp, Neisseria meningitidis; identical to SEQ ID NO: 55167

SEQ ID NO: 69400 - DNA, 996 bp, Neisseria meningitidis
ttgcagcctttagtcagcgtattgatttgcgcctacaacgtagaaaaatatttcgcccaatcattagccgccgtcgtgaatcaaacttggtgcaacttggatattttgattgtcgatgacggctcgacagacggtacgcttgccattgccaaggattttcaaaagcgggacagccgtatcaaaatccttgcacaagctcaaaattccggcctgattccctctttaaacatcgggctggacgaattggcaaagtcggggggggaatatattgcacgcaccgatgccgacgatattgccgcccccgactggattgagaaaatcgtgggcgagatggaaaaagaccgcagcatcatcgcgatgggcgcgtggctggaagtgttgtcggaagaaaaggacggcaaccggctggcgcggcatcacaggcacggcaaaatttggaaaaagccgacccggcacgaagatattgccgactttttccctttcggcaaccccatacacaacaacacgatgattatgcggcgcagcgtcattgacggcggtttgcgttacaacaccgagcgggattgggcggaagattaccaattttggtacgatgtcagtaaattgggcaggctggcttattatcccgaagccttggtcaaataccgccttcacgccaatcaggtttcatccaaatacagcgtccgccaacacgaaatcgcgcagggcatccaaaaaaccgccagaaacgattttttgcagtctatgggttttaaaacccggttcgacagccttgaataccgccaaataaaagcagtagcgtatgaattgctggagaaacatttgccggaagaagattttgaacgcgcccgccggtttttgtaccaatgcttcaaacggacggacacgctgcccgccggcgcgtggctggattttgcggcagacggcaggatgcggcggctgtttaccttgaggcaatacttcggcattttgcaccgattgctgaaaaaccgttga

SEQ ID NO: 69401 - DNA, 477 bp, Neisseria meningitidis; identical to SEQ ID NO: 46371

SEQ ID NO: 69402 - DNA, 654 bp, Neisseria meningitidis; identical to SEQ ID NO: 61931

SEQ ID NO: 69403 - DNA, 1392 bp, Neisseria meningitidis; identical to SEQ ID NO: 56132

SEQ ID NO: 69404 - DNA, 714 bp, Neisseria meningitidis; identical to SEQ ID NO: 54498

SEQ ID NO: 69405 - DNA, 1110 bp, Neisseria meningitidis
ttgttaatccactatagaaacgatgggctgaagcccgccactggcaatactcattttaaagttcaaaccatgcaacccatccgataccgaaccgaccttaccccctacaacactttcggcctgcgcgcccaagcccgagcctttattgcgcttgaacacgccgacgggttgcgcgacatcgtccggctacccgagttcaaccgagatactgttttatggctgggcggcggcagcaatatccttttgatggaggactacgccggtctggtcgtacatatggaaaacaaaggcatacgcgaaattgctcgttcagacggcatggttctgattgaagcgcaggcgggcgaaatctggcacgattttgtcctgcacgccgtcgcgctgggtttgaacggtttggaaaacctgagcctgattccgggtacggtcggcgcgtcgcccgtgcagaacatcggcgcatacggcgtagaggcgaaagatgtgattcacagcgtgcgctgcttcgatttggatacggaaacctttgtaaccctttccaatgccgactgccgcttcgcctaccgcgaaagcctgttcaagcaggaaggtaaagggcgttatgtgattgtttcggtcgtatttgcattaaaaacgcattttgtgccgaacttgggttacggcgatttggcggccgccgttgccgaactgagcgcgggcagggtgccgacggcgaaagatgtttccgatgcagtgtgtgcaatccgcaacagtaaacttcctaatcctaacgtgcttggcaatgtcggcagtttctttaaaaaccccgtcgtcagcgcagaaaaagccgccaccttgttgcagcggcatcctgatatgccgcgctatccgcagcccgacggttcggtcaaactcgccgccggctggctgatcgaccaatgtcgtctgaaaggctttcaaatcggcggcgcggcggtacatgacaggcaggctttggtcttagtgaacaaaaacaatgcctcggcaaacgatgtccggcagttggcgcaacacatcaaatttacagtatttgctcggtttcaggtagaattgcacgccgaacccaattggctgcctgcttcgttcagcctgtaa

SEQ ID NO: 69406 - DNA, 366 bp, Neisseria meningitidis; identical to SEQ ID NO: 54775

SEQ ID NO: 69407 - DNA, 312 bp, Neisseria meningitidis; identical to SEQ ID NO: 54531

SEQ ID NO: 69408 - DNA, 798 bp, Neisseria meningitidis; identical to SEQ ID NO: 60613

SEQ ID NO: 69409 - DNA, 309 bp, Neisseria meningitidis; identical to SEQ ID NO: 54941

SEQ ID NO: 69410 - DNA, 423 bp, Neisseria meningitidis; identical to SEQ ID NO: 40586

SEQ ID NO: 69411 - DNA, 537 bp, Neisseria meningitidis; identical to SEQ ID NO: 42803

SEQ ID NO: 69412 - DNA, 891 bp, Neisseria meningitidis; identical to SEQ ID NO: 62002

SEQ ID NO: 69413 - DNA, 1392 bp, Neisseria meningitidis; identical to SEQ ID NO: 55796

SEQ ID NO: 69414 - DNA, 1167 bp, Neisseria meningitidis; identical to SEQ ID NO: 61659

SEQ ID NO: 69415 - DNA, 747 bp, Neisseria meningitidis; identical to SEQ ID NO: 51012

SEQ ID NO: 69416 - DNA, 1419 bp, Neisseria meningitidis; identical to SEQ ID NO: 55695

SEQ ID NO: 69417 - DNA, 699 bp, Neisseria meningitidis; identical to SEQ ID NO: 54590

SEQ ID NO: 69418 - DNA, 567 bp, Neisseria meningitidis; identical to SEQ ID NO: 55982

SEQ ID NO: 69419 - DNA, 642 bp, Neisseria meningitidis; identical to SEQ ID NO: 54738

SEQ ID NO: 69420 - DNA, 843 bp, Neisseria meningitidis; identical to SEQ ID NO: 61472

SEQ ID NO: 69421 - DNA, 225 bp, Neisseria meningitidis; identical to SEQ ID NO: 36979

SEQ ID NO: 69422 - DNA, 1278 bp, Neisseria meningitidis; identical to SEQ ID NO: 55803

SEQ ID NO: 69423 - DNA, 1407 bp, Neisseria meningitidis; identical to SEQ ID NO: 61464

SEQ ID NO: 69424 - DNA, 267 bp, Neisseria meningitidis; identical to SEQ ID NO: 55621

SEQ ID NO: 69425 - DNA, 144 bp, Neisseria meningitidis
atggcgcgttatcgcagaaacttcattgccggcggcacattctttttcaccgtcaaactcgccgacccgaaatcgcgcctgcttgtcgaacatatcgacttcgcgggcggcttatatggatgtgcaaaaacaatattcctttga

SEQ ID NO: 69426 - DNA, 480 bp, Neisseria meningitidis; identical to SEQ ID NO: 54952

SEQ ID NO: 69427 - DNA, 558 bp, Neisseria meningitidis; identical to SEQ ID NO: 60691

SEQ ID NO: 69428 - DNA, 1071 bp, Neisseria meningitidis; identical to SEQ ID NO: 56015

SEQ ID NO: 69429 - DNA, 1797 bp, Neisseria meningitidis
atgaataccgtatcgaattacctgtccgcattgcgcgaagccatgaaggcgcaaggcttggatgcactcgtcatcccttccgccgacccccacctgtccgaatacctgcccgaacattggcaggcgcggcgcgaattgtcgggctttaccggctcggtcggcacattcgtcgttaccgccgacgaagcgggcgtatgggtggacagccgctattgggaacaagccgccaagcagcttgcgggcagcggcatcgaactgcaaaaaagcgggcaagtgccgccgtataacgaatggctcgcggcaaacctgcccgaaaacgccgccgtcggcatcctttccgatatggtctcgctcaccggcaaacgcactttagcgcaatcgctcgccgccaaaaacatccgcatcgaacaccccgacggcctgcttgaccaagtgtggacaagccgcccggccattcctgccgaaaccgtgttcgtccacgaccccgcctacgtctccgaaaccgccgccgaaaaactcgcccgcgtgcgcgccgtgatggcggaaaaaggcgcggattaccacttggtttcctcgctcgacgacatcgcctggctgaccaacctgcgtggcagcgacgtacctttcaaccctgttttcgtgtccttcctgctgattggcaaagacaacgccgtcctgtttaccgaccgatgccgtctgaacgccgaagccgccgccgcgctgcaaaccgcaggcatcacggtcgaaccttatgcccaagttgccgacaaactcgcgcaaatcggcggcgcgctgcttatcgaaccgaacaaaaccgccgtcagcacgcttgtgcgcctgcccgaaagcgtgcgccttatcgagggaatcaacccatccacgctgttcaaatcctgcaaatccgaagccgacatcgcccgcatccgcgaagcgatggaacacgacggcgcggcgttgtgcggtttcttcgccgagtttgaagacatcatcggcaacggcggcagcctgaccgaaatcgacgtggacaccatgctttatcgccaccgcagcgtgcgcccaggcttcatttcattgagtttcgacaccatcgcaggcttcaacgccaacggcgcactgccgcattacagcgcaacgcccgaaagccacagcaccatcagcggcaacgggcttttgctcatcgactccggcgcgcaatacaaaggcggcacgaccgacatcacccgcgtcgtccctgtcggcacgccgagtgccgaacaaaaaagcgacaacaccctcgttctcaaagcccatatcgcgcttgccgaagccgtattccccgaaaacatcccctcgccgctgattgatgcgatttgccgcaaacccctgtggcaggcgcaatgcgactacggccacggcaccggacacggcgtaggctatttcctcaacgtccacgaaggcccgcagcgcatcgccttcgccgcccccgccacgcccgaaaccgccatgaaaaaaggcatggttacctccatcgaacccggactctaccgcccgggaaaatggggcatccgcattgaaaaccttgccgccaaccaagccgtcgccgcccctcaagaaaccgaattcggcagcttcctctgttttgaaaccctgaccctctgccccatcgatacacgcctgatggacaccgccctcatgaccgacggcgaaatcgactgggtcaaccgctaccacgccgaagtccgccgccgcctcgagccgctgaccgaaggcgcggcaaaagcgtggctgatcaaacgcaccgaaccgctggcgcgttaa

SEQ ID NO: 69430 - DNA, 1092 bp, Neisseria meningitidis; identical to SEQ ID NO: 61804

SEQ ID NO: 69431 - DNA, 1149 bp, Neisseria meningitidis
atgcccctccctctcccctctcccgaagcacggcaattctcgctcaaactgcaaaccctcattgccgaaaaaatcggcaaacacggcaactggattccattttcacgttttatggaattggttttatacgctccgcaatacggctactacaccggcggcagccataaaatcggcaataccggggattttattaccgcaccgaccctcacctctctgtttgcacagacactggcacgccaacttcaagaacttctatcccaaacggcgggcaatatctatgaattcggcgcgggaaccggacagcttgccgccgatttgttgggcagcatttcggacggcatcagccgttactatattattgaaatatcgccggagctggcagcacgtcagaaaaacctgattcaagcacgcgcaccggaagcatctcaaaaagttgtccacttgaccgcacttcccgaagcgtttgacggcatcatcatcggcaacgaagtactcgatgccatgcctgtcgaaatcgtccgtaaaaatgaaggcggctcattcgagcatgtcggcgtttgcctagataatgaccgttttacctattcggcacgaccgctgcacgacttacagctatctgccttggcttccctctattttcctcaaacagattatccctacaccagcgaactacatccgcaacaatatgcctttatccgcacccttgcctcaaggcttgaacgcggaggtatgatattcatcgactacggttttgatgcagcgcagtattaccaccctcaacgcaatcaaggtactctgatcggacactaccgacatcacgttatccacaatccttttgacttcatcgggttggccgacctgaccgcgcatgtcaactttaccgacattgcccaagccggtacggatgcaggactggatttgacaggctatctgccccagtcccattttctgctgaatctgggcataaccgaactgttggcacaagtgggaaaaacagactcgcccgcctacatccgtgaagctgctgccgttcagaaactgattgaccagcatgaaatgggagaattgtttaaagtcatcgcattcggtaaaaatatcggcgtcgactgggcaggattccgcttcggcgacatctgccacaaactctaa

SEQ ID NO: 69432 - DNA, 342 bp, Neisseria meningitidis; identical to SEQ ID NO: 43005

SEQ ID NO: 69433 - DNA, 246 bp, Neisseria meningitidis; identical to SEQ ID NO: 44126

SEQ ID NO: 69434 - DNA, 918 bp, Neisseria meningitidis; identical to SEQ ID NO: 55893

SEQ ID NO: 69435 - DNA, 2100 bp, Neisseria meningitidis
atgccgtctgaaagacgtttccgacccatccctactacacgctttgtccgcaaacgcatcacaggcaagattatggaagtcattcgataccccgattcccccttcaaactccaccaacccttcccgcccgcaggcgaccagcctaccgctattgccgacttgctcgaagggctttcagacggccttgcctaccaaaccctgctcggcgtaaccggttcgggcaaaacctacaccatggcgaacgtcatcgcccaaagcggccgacccgccatcatcatggcgcacaacaaaacccttgccgcccagctttatgccgaaatgcgcgagtttttccctgaaaacgcggtggaatatttcgtctcctactacgactattaccaacccgaagcctatgtgccaagccgcgatttgttcatcgaaaaagacagtgcgatcaacgaacacattgaacaaatgcgcctttctgccaccaaaaacctgatgacgcgcgatgacgtgattatcgttgccactgtgtccgccatttacggtatcggcgacccgactgagtatcaacaaatggtgttgtccgtcaaagaaggcgacaccatcgagcagcgcgacatcatcgccacgctcgtttccatgcagtacgaacgcggcgatttggatttcaaacgcggcagcttccgcgtgcgcggcgacgtgattgacgtgtaccccgccgaaagctccgaaaacgccttgcgtatcagcctgtttgacgacgaaatcgaccgcctcgatatgtttgacccgctttcaggcagcctgcaccaacgcgtcggccgctacaccgtcttcccgtccagccactacgttaccccgcgcgacaccgtattgcgcgcctgcgagtccatcaaagaagaattgcgcgaacgcattgatttctttaccaaagaaaaccgtcccgtcgagcaacaacgcatcgaacagcgcacccgtttcgacctcgaaatgctctacgaaatgggcttctgcaaaggtatcgaaaactactcccgtcacttctccggcaaaaaagaaggcgaaccgccgcccacgctgatggactacctgcccgacaacgccatcatgttcatcgacgaaagccacgttaccgtcacacaaatcggcggcatgtacaaaggcgacgcatcgcgcaagcaaaacctcgtcgattacggcttccgcctaccttccgcccgcgacaaccgcccgctcaaattccacgaatttgaaaaagtcatgccgcaaaccgtcttcgtttccgccacccccgccaaatacgaagaagaacacgccggacaagtggtcgaacaagtcgtccgccccacagggctggtcgaccctcaaatcatcatccgccccgtcgccacccaagttgatgacttaatgagcgaaatcaacgaccgcatccaaaaaggcgaacgcgtactcgttaccacccttaccaaacgcatggcggagcaactcaccgactattacagcgaactcggcatcaaagtgcgctacctgcacagcgacatcgacaccgtagagcgcgttgaaattattagagatttacggctcggattgtttgacgtactcgtcggcatcaatctcttgcgcgaaggcctcgacatcccagaagtctccctcgtcgccatcctcgacgcagacaaagaaggcttcctgcgctcccaccgcagcctgattcaaaccataggccgcgctgcgcgcaacgtgaacggcgtcgcgattctgtacgccgacaaaatcaccgactctatgaaagccgccatcgacgaaaccgaacgccgccgtgaaaaacaaattaaattcaacgaagaacacggcatcgtgccgcaacagattaaaaaacaggtcaaagacatcattgacggcgtgtaccacgaagaagacagcggcaaaggccgtagacaaggcaaaaacaaagttaaagtcggcgaaattcacaacgaagaagacacgattaaagaaatcgccaaactcgaaaaagccatgcaacaggcggctagggatttgcagtttgaagaagcggctgttcttcgtgataggatacggaatattaaagagagtttgttgtttggggcggaataa

SEQ ID NO: 69436 - DNA, 951 bp, Neisseria meningitidis; identical to SEQ ID NO: 44968

SEQ ID NO: 69437 - DNA, 369 bp, Neisseria meningitidis; identical to SEQ ID NO: 54842

SEQ ID NO: 69438 - DNA, 1416 bp, Neisseria meningitidis; identical to SEQ ID NO: 55862

SEQ ID NO: 69439 - DNA, 252 bp, Neisseria meningitidis; identical to SEQ ID NO: 39189

SEQ ID NO: 69440 - DNA, 1095 bp, Neisseria meningitidis; identical to SEQ ID NO: 54326

SEQ ID NO: 69441 - DNA, 1008 bp, Neisseria meningitidis
atgagcaccttcttccagcaaaccgcccaagccatgattgctaaacacatcaaccgcttcccgctattgaagttggaccaggtgattgattggcagccgatcgaacaatacctgaaccgtcaaaaaacccgttaccttagagaccaccgcggccgtcccgcctatcccctgttgtccatgttcaaagccgtcctgctcggacaatggcacagcctctccgatcccgaactcgaacacagcctcatcacccgcatcgatttcaacctgttttgccgttttgacgaactgagcatccccgattacagcaccttatgccgctaccgcaactggttggcgcaagacaacaccctgtccgaattattggaactgatcaaccgccaactgaccgaaaaaggcttaaaagtagagaaagcatccgccgccgtcattgatgccaccattattcagactgccggcagcaaacagcgccaggccatagaagtcgacgaggaaggacaagtcagcggtcaaaccacactgagtaaggacaaaaatgcccgttggacaaagaaaaacggcctctacaaactcggttacaaacaacatacccgtaccgatgcggaaggctatatcgagaaactgcacatcacccccgccaatgcccatgagtgcaaacacctgtcgcctttgctggaaggactgcccaaaggtacgaccgtctatgccgacaaaggctatgacagtgcggaaaaccggcaacatctggaagaacatcagttgcaggacggcattatgcgcaaagcctgccgcaaccgtccgctgacggaaacgcaaaccaaacataaccgatatttgtcgaagatccgttatgtggtcgaacaaagcttcggtacgctgcaccgcaaattccgctatgcgcgggcagcctatttcgggctgattaaagtgagtgcgcaaagccacctgaaggcgatgtgtttgaacctgttgaaagccgccaacaggctaagtgcgcccgctgccgcctaa

SEQ ID NO: 69442 - DNA, 906 bp, Neisseria meningitidis; identical to SEQ ID NO: 60626

SEQ ID NO: 69443 - DNA, 669 bp, Neisseria meningitidis; identical to SEQ ID NO: 60330

SEQ ID NO: 69444 - DNA, 486 bp, Neisseria meningitidis; identical to SEQ ID NO: 37620

SEQ ID NO: 69445 - DNA, 972 bp, Neisseria meningitidis; identical to SEQ ID NO: 39558

SEQ ID NO: 69446 - DNA, 1233 bp, Neisseria meningitidis; identical to SEQ ID NO: 60337

SEQ ID NO: 69447 - DNA, 429 bp, Neisseria meningitidis; identical to SEQ ID NO: 54930

SEQ ID NO: 69448 - DNA, 507 bp, Neisseria meningitidis; identical to SEQ ID NO: 54410

SEQ ID NO: 69449 - DNA, 408 bp, Neisseria meningitidis
ttggctgaaggtcaaaaatcagccgttaccgagtattacctgaatcacggcgaatggcccgccaacaacaattctgccggcgtggcaacctccgccgacatcaaaggcaaatatgttaaaagcgttgaagtcaaaaacggcgtcgttaccgcccaaatggcttcaagcaacgtaaacaacgaaatcaaagacaaaaaactctccctgtgggccaagcgtcaaaacggttcggtaaaatggttctgcggacagccggttacgcgcgacgccaacaacgccgacgccgtcgccgccgccaagaccggcaccaacaaaatcgacaccaagcacctgccgtcaacctgccgcgacgcagcatctgccgtttgcatagaaacaccacctacggctttctataaaaatacctaa

SEQ ID NO: 69450 - DNA, 570 bp, Neisseria meningitidis; identical to SEQ ID NO: 61300

SEQ ID NO: 69451 - DNA, 246 bp, Neisseria meningitidis; identical to SEQ ID NO: 42918

SEQ ID NO: 69452 - DNA, 912 bp, Neisseria meningitidis
atggacaccctgttcagcctcaaggttttccgccaagtcgtccaaagcggcggcttcacccgcgccgccgacgcgctcggcatctccaccgcaatggcaagcaaacacgtcagccacttggaaaacaccgtccaagccaaactcctgcaccgcaacagccgcaacctcagcctgaccgaagccggggaagaatactaccggcaatgcagttacgcgctcgacacgctcgacgatgccgcgcaaaaagccgccggggggacggaaaaaccgcaggggctgctgcgcgtaacgatgccactgtggtttgccggcagccagatatgcaactggctggcggaataccgcgaacgttatcccgaagtgacattagaactgattttggacaaccgccacgtcgatttgattgccgaaggcgtggatttggcgttgcgcgtttcccaaaccctgtccccgtcactgattgcgcgcccactggcggaaatcgaatttgccctgcttgcctcgcccgacttcctgaggcgcaacggcgtgccggaaacgccggaagaagtggcggggctgcccgccgtcctgccgacctacaccaaccagcagaaactcgacctcacccgcaaatcggacggcaaaaaataccggcttgaactgacccccgtcatccgtaccgacaacacgctgatgatgcgcgaaatgattaaggcgggcgcgtgcatcggttatcagccgctttgggcggcggaacacgatttgcgctgcggcacgctggtgaggctgctgcccggatacgccgtcccgaccgaccggctgaatgccgtttatgcagacagggcattcttaagcgcgaaagtccgcagcttcatcgattttctgaacgaaaaaatcgccagcaggaaaggctgccgaaatgccgtctga

SEQ ID NO: 69453 - DNA, 501 bp, Neisseria meningitidis; identical to SEQ ID NO: 41327

SEQ ID NO: 69454 - DNA, 744 bp, Neisseria meningitidis; identical to SEQ ID NO: 55012

SEQ ID NO: 69455 - DNA, 393 bp, Neisseria meningitidis; identical to SEQ ID NO: 54872

SEQ ID NO: 69456 - DNA, 453 bp, Neisseria meningitidis; identical to SEQ ID NO: 61776

SEQ ID NO: 69457 - DNA, 318 bp, Neisseria meningitidis; identical to SEQ ID NO: 54811

SEQ ID NO: 69458 - DNA, 375 bp, Neisseria meningitidis
ttggtcgaaggtcaaaaatcagccgtcaccgagtattacctgaatcacggcatatggcccggcgacaacaattctgccggcgtggcaacctccaccgacattaaaggcaaatatgttaaggaggttgaagtcaaaaacggcgtcgttaccgccacaatgctttcaagcggcgtaaacaacgaaatcaaaggcaaaaaactctccctgtgggccaagcgtcaaaacggttcggtaaaatggttctgcggacagccggttcagcgcaacgacaccaccaccaccaacgacgacgtcaacaaagccaccggcaacaacgaaatcgacaccaagcacctgccgtcaacagcaccgacaagaaaatcgacaccaaactag

SEQ ID NO: 69459 - DNA, 198 bp, Neisseria meningitidis; identical to SEQ ID NO: 36305

SEQ ID NO: 69460 - DNA, 1578 bp, Neisseria meningitidis; identical to SEQ ID NO: 61171

SEQ ID NO: 69461 - DNA, 396 bp, Neisseria meningitidis; identical to SEQ ID NO: 54642

SEQ ID NO: 69462 - DNA, 210 bp, Neisseria meningitidis; identical to SEQ ID NO: 60443

SEQ ID NO: 69463 - DNA, 1980 bp, Neisseria meningitidis; identical to SEQ ID NO: 61765

SEQ ID NO: 69464 - DNA, 450 bp, Neisseria meningitidis; identical to SEQ ID NO: 49232

SEQ ID NO: 69465 - DNA, 927 bp, Neisseria meningitidis; identical to SEQ ID NO: 60741

SEQ ID NO: 69466 - DNA, 444 bp, Neisseria meningitidis; identical to SEQ ID NO: 38644

SEQ ID NO: 69467 - DNA, 1773 bp, Neisseria meningitidis; identical to SEQ ID NO: 61189

SEQ ID NO: 69468 - DNA, 765 bp, Neisseria meningitidis; identical to SEQ ID NO: 61387

SEQ ID NO: 69469 - DNA, 879 bp, Neisseria meningitidis; identical to SEQ ID NO: 46918

SEQ ID NO: 69470 - DNA, 1647 bp, Neisseria meningitidis; identical to SEQ ID NO: 60824

SEQ ID NO: 69471 - DNA, 861 bp, Neisseria meningitidis; identical to SEQ ID NO: 47037

SEQ ID NO: 69472 - DNA, 270 bp, Neisseria meningitidis; identical to SEQ ID NO: 60624

SEQ ID NO: 69473 - DNA, 369 bp, Neisseria meningitidis; identical to SEQ ID NO: 39932

SEQ ID NO: 69474 - DNA, 1128 bp, Neisseria meningitidis; identical to SEQ ID NO: 60599

SEQ ID NO: 69475 - DNA, 1518 bp, Neisseria meningitidis
atgtctcctaaaaaaatacccatttggcttaccggcctcatcctactgattgccctaccgcttaccctgccttttttatatgtcgctatgcgttcgtggcaggtcggcatcaaccgcgccgtcgaactgttgttccgcccgcgtatgtgggatttgctctccaacaccttgacgatgatggcgggcgttaccctgatttccattgttttgggcattgcctgcgcccttttgttccaacgttaccgcttcttcggcaaaaccttttttcagacggcaatcaccctgcctttgtgcatccccgcatttgtcagctgtttcacctggatcagcctgaccttccgtgtcgaaggcttttgggggacagtgatgattatgagcctgtcctcgttcccgctcgcctacctgcccgtcgaggcggcactcaaacgcatcagcctgtcttacgaagaagtcagcctgtccttgggcaaaagccgcctgcaaacctttttttccgccatcctcccccagctcaaacccgccatcggcagcagcgtgttactgattgccctgcatatgttggtcgaatttggcgcggtatccattttgaactaccccacttttaccaccgccattttccaagaatacgaaatgtcctacaacaacaataccgccgccctgctttccgctgttttaatggcggtgtgcggcatcgtcgtatttggagaaagcatatttcgcggcaaagccaagatttaccacagcggcaaaggcgttgcccgtccttatcccgtcaaaaccctcaaactgcccggtcagattggcgcgattgtttttttaagcagcttgttgactttgggcattattatcccctttggcgtattgatacattggatgatggtcggcacttccggcacattcgcgctcgtatccgtatttgatgcctttatccgttccttaagcgtatcggctttaggtgcgattttgactatattatgtgccttgccccttgtttgggcatcggttcgctatcgcaattttttaaccgtttggatagacaggctgccgtttttactgcacgccgtccccggtttggttatcgccctatccttggtttatttcagcatcaactacacccctgccgtttaccaaacctttatcgtcgtcatccttgcctatttcatgctttacctgccgatggcgcaaaccaccctgaggacttccttggaacaactcccaaaagggatggaacaggtcggcgcaacattggggcgcggacacttctttattttcaggacgttggtactgccgtccatcctgcccggcattaccgccgcattcgcactcgtcttcctcaaactgatgaaagagctgaccgccaccctgctgctgaccaccgacgatgtccacacactctccaccgccgtttgggaatacacatcggacgcacaatacgccgccgccaccccttacgcgctgatgctggtattattttccggcatccccgtattcctgctgaagaaatacgccttcaaataa

SEQ ID NO: 69476 - DNA, 1011 bp, Neisseria meningitidis
atgagcgatacccccgctacccgcgatttcggtctgatcgacgggcgtgccgtaaccggctatgtgctgtccaaccggcgtggtacgcgtgtctgcgtgctggacttgggcgggattgtgcaggaattttccgttttggcagacggcgtgcgcgaaaacctcgtggtgtcgttcgatgatgcggcttcctatgcggacaatccgtttcagattaacaaacagatagggcgcgtggccggacgcatccgcggtgcggcgttcgacatcaacggcaggacttaccgcgtggaggccaacgaaggcaggaacgcgctgcacggcggttcgcacgggctggccgttacccgtttcaacgcggtggcggcagacggccgttcggtggtgctgcgcagccgcctgcaacagtcggccgacggttatcccaacgatttggatttggatatttcctaccgcttggacgaggacgaccggcttaccgttagctatcgcgccaccgcgctcggcgacacggtgttcgacccgacgctgcacatttactggcggctggacgcgggcctgcacgatgcggttctgcatattccgcagggcggacatattccggccgatgccgaaaaactgcccgtctcaacggtttcagacgacctcgaagtatttgatttcagccggcccaagccgctggatgccgccgttgccgccctgcgccgcgaaacgggtcgggccggttttgacgacgcttaccgcgtgccgtccgatataggccgtcccgccgctgtgttgcaagccggacgccgccgtcgtatcagcatatacagcgaccgcaatggcttggtcatctttaccgccgccccgcaggatttcgcgcggcacgatgcgggcgtttacgacgcgctggcgaccgaggcgcagacgctgcccgacagcctgcattggcccgagttcggcaatattcgtctgaacaagggtgataccagggaggcgacgattgcttacggcatcgaatccctttcttag

SEQ ID NO: 69477 - DNA, 1542 bp, Neisseria meningitidis
atgaagtttttagaccgtgaggcaagcattgccaagccgggtttcaaccgttggctcgtaccgcccgcagcattggcggtacaccttgccatcgggcagatttacgcctattccgtattcaacgcgccgctgaccaaacttatcggcataaccgaatcggcggccggagattggaagctgacgaccgtaggttggattttcagtatcgcactcgcgatgctgggcgcgtcggccgccctgttcggcacatggatggaacgggtagggccgcgcaaagccatatttgccgccgcctgctgtttcagcctgggcttcttcgtatccgcattcggcgtgagtacgcacaacctcttcctgctttatttgggcaacggcgtcatcggtggcgtaggcttaggcttaggctacatcgggccggtttccacactgatgaaatggtttcccgacaagccgggtatggcgaccggtttggcaattatgggtttcggcggcggcgcaatgctggcctcaccgctttccgtatcactgatgaacgccttttcaaacgccgcttcggtcggggttgttgaaacctttgccgtattgggactgctttacctcgcactgatgatgttcggcgcgtttaccatctgcgtacctgccgacggctggaaacctgaaggctatatcgcgccgaaaacgcaaaacaagctggtcagcagcaatcatgtcaacgtgtcccaagccatgaaaacgccgcagttttggctgttgttctgggtattgtgcctaaacgtaactgccggcatcggcgtattgggtcaggcatccgtgatgattcaggaactcttttccgaaacctccataggcaggcaggcagcagtcggcgcaggtgcggcggcaggcttcgtcagcctcctgagcctgtttaacatgggcggacgctttttgtggtcgagcgtttccgacaaaatcggacgcaaaaacacctacaccatcttcttcgtactcggttcgctgctgtatttcgccgttccctccatcggcgagggcggcagcaaagccctgttcatcatcggcttttgcgtgattatttccatgtacggcggcggatttgccgccattcccgcctacctgaaagacctgttcggcacctatcaggtcggcgcgattcacgggcgcatcctgctggcctggtcaaccgccgccgtcatcggcccggtactggtcaattacatacgccaaagccaaatcgacagcggcataccggcggcacaggcatacagcgtaaccatgtacatcatggcgggtctgctgattatcggtttgttgtgcaacctcgccgtcaaatccgtacacgaaaaacaccacgaaaaagacatcaaaaccgccgcacacagcggcaaccccgatgacgaaaccgccatatccgacgcttaccttgtgggcgaaaaagtttccggcggcggcatatcggtctggtggcgttgggcattggccgtcataccgctcgcctacggcgtggtgatggtctttgtcaaagcactcgaccttttctcctga

SEQ ID NO: 69478 - DNA, 2016 bp, Neisseria meningitidis
atgaaatcctaccccgacccctaccgccattttgaaaacctcgattccgccgaaacgcaaaacttcgctgctgaagcgaatgccgaaacgcgcgcgcgttttttaaacaacgacaaggcacgcgcattgtctgacggcattttggcgcagttgcaggacacgcggcaaattccgttttgtcaggaacaccgcgcgcggatgtaccatttccatcaggacacggaatatccgaagggcgtgtaccgcgtgtgtacggcggcgacttaccgttccggctatcctgagtggaaaatcctgttttcggtggcggatttcgacgaattgctcggcgacgatgtgtatttgggcggcgtgtcgcacttggtggaacagcccaaccgcgcgttgttaacactgagcaaatcgggcggcgatacggcgtacacgctggaagtggatttggaagcaggggaattggtagaaggcggttttcactttccggcaggtaaaaaccatgtgtcgtggcgcgatgaaaacagcgtatgggtgtgtccggcttgggacgaacgccagttgaccgaatcgggctatccgcgcgaggtgtggctggtggaacgcggcaaaagtttcgaggaaagcctgcctgtgtatcaaatcgataaagatgcaatgatggtgaacgcgtggcgttatctcgatccgcagggttcgccgattgatttgattgaagcgtcggacggtttttacaccaaaacctatttgcaggtgtcgtcggaaagcgaggcgaaaccgttaaacctgcccaacgattgcgacgtggccggctatctggccggacatcttttgctgacgttacgtaaagactggaaccgcgcgaaccaaagctatccgagcggcgcattggtggcggtgaagctgaatcggggcgaactcggggcggcacagcttttgtttgcgcccgatgaaacgcaggcattggaaagcgtggaaacgaccaagcgttttgtggtggcgagcctgctggaaaacgtacaaggccgtctgaaagcgtggcggtttgccgatggcaaatggcaggaagctgagttgccgcgcctgccttcgggcgcgttggaaatgaccgatcagccttggggcggcgacgtggtttaccttgccgccagcgatttcaccacgccgctgacgctgtttgcgctggatttgaacgtgatggaactgaccgtcatgcgccgccagccgcagcagtttgattcagacggcattaacgtgcagcagttttggacgacttcggctgacggcgagcgcattccttatttccacgtcggcaaaaacgccgcgcccgacatgccgacgctggtctatgcctacggcggtttcggcattcccgaattgccgcattatctgggcagcattggcaaatattggctggaagagggcaatgcctttgtattggcgaacatccgcggcggcggcgagttcggcccgcgctggcatcaggcggcgcagggcatcagcaaacataaaagcgttgatgatttattggcagtcgtgcgcgatttgtccgaacgcggcatgagttcgcccagacacatcggtttgcagggcggcagcaacggcggcctgattaccgccgctgccttcgtgtgcgaaccgcaaagcatcggcgcgctggtgtgcgaagtaccgctgaccgacatgatccgttatccgctattgtccgccggttcaagttggacggacgaatacggcaatccgcaaaaatacgaagtctgcaaacgctggctgggcgaattgtcgccgtatcacaatctttcagacggcatcgattatccgcctgcgctcattaccaccagcctcagcgacgaccgcgtccatcctgcccacgcgctcaagttttacgccaaactgcatgaaacctcggcgcaatcttggctctactcgcctgacggcggcggccataccggcaacggcacccaacgcgaatccgccgacgaactcgcctgcgtcttgctgtttttgaaagagtttttgggctaa

SEQ ID NO: 69479 - DNA, 1776 bp, Neisseria meningitidis; identical to SEQ ID NO: 55048

SEQ ID NO: 69480 - DNA, 189 bp, Neisseria meningitidis; identical to SEQ ID NO: 42129

SEQ ID NO: 69481 - DNA, 498 bp, Neisseria meningitidis; identical to SEQ ID NO: 56033

SEQ ID NO: 69482 - DNA, 1629 bp, Neisseria meningitidis
gtgtttatcgaagccgaaaacctcgaagcactgaaaatcctgcaaaaatcctatgccggcagcgtaaagatgatttacatcgacccgccctacaataccggcaacgattccttcgtctatcccgacaaattctccgaaagccgcgaagaatacgcccgccgcgtgggcgataccgacgacgcgggttacctgaagcgcgacggcgtgttccagggcgcgtggcgcaaaaacggcaaagacagtggccattaccacagcaactggctctctatgatgctgccgcgcctgcatctggcgaaaaccctgctgcgcgaagacggcgtgatttttatcagcattgacgacaacgaacaggcgcagttgaaattgttatgtgatgaagtgtttggggcggagaattttgtcggtcagtttccttggcgcaaacgcacggcaaaatcggacgtgccgttcggcgtttccgccgattatgaatatctgcttgcctatgcccgcagtaatgcctttattgccagtatcgatgcggaagaacgcagatattttgaaaccgatgatttcccgaatcgcccgtggcggacgcatgatttgactactcaaagaaatgccagtgaacgaccaaatagttttttcactatggttaatcctaaaacaggcaaagaatatccggcgaatccaaatgcaacttggcgtgttactaaggatacatttcaagaatattacaatgcgggaaaaatcgttttccccgatgattacgatttcctcaaaattaaaaaccccgttatgcgttattttaaagatgacgacatgaagaaagacggagagcgcttcggacgtaaggcagtcagtacacggctacctgaaaatgtaggtatgtcgctgaacggtacaaaagaaattaccgaactgtttaaaagcaagttgtttgattttcccaaaccgtcatccctaattaaatatttactgcaaatcctccatgtttcagacggcctcatcctagacttcttctccggcagcggcaccaccgcccatgccgtgatgcaactgaatgccgaagacggcggcaaccgccgtttcatctgtgtccagctccccgaagaaaccgacgaaaaatctgaagcgcgcaaggcgggtttcgacacgattgccgaaattgccaaagaacgcatccgccgcgcaggcaggcagatttcagacggccttcaagacggatcggaaacagatacgggctttaaagttttcaaacttgccgaaagcggtttcaaacaatggcggcagcccgagcagtccgatacggaagccctgcaacgcgaattgtcgttgaatatcgattctgtgctgtccgaaacgtcgtctgaaaatctgctctacgaattgatgctgcgtatgggcttgaagctgacttgcaaggtttcgtttttagacgacgtatatttcgtggaagacgaggatacgggcgggctgtacgctttcctgctgaaacgcgtggatcaaggtttgattgatgccgtgctggcgaagcatcccgctaaggtggcggcattggacaggctgtttgagggcgacgatgcgcttaaaagcaataccgtattgcagatgaaggatgcgggcgtgatgttcgagtgtgtgtag

SEQ ID NO: 69483 - DNA, 918 bp, Neisseria meningitidis; identical to SEQ ID NO: 61124

SEQ ID NO: 69484 - DNA, 624 bp, Neisseria meningitidis; identical to SEQ ID NO: 62208

SEQ ID NO: 69485 - DNA, 495 bp, Neisseria meningitidis; identical to SEQ ID NO: 62134

SEQ ID NO: 69486 - DNA, 138 bp, Neisseria meningitidis; identical to SEQ ID NO: 36823

SEQ ID NO: 69487 - DNA, 264 bp, Neisseria meningitidis; identical to SEQ ID NO: 46496

SEQ ID NO: 69488 - DNA, 669 bp, Neisseria meningitidis; identical to SEQ ID NO: 51481

SEQ ID NO: 69489 - DNA, 1404 bp, Neisseria meningitidis; identical to SEQ ID NO: 61970

SEQ ID NO: 69490 - DNA, 792 bp, Neisseria meningitidis; identical to SEQ ID NO: 60729

SEQ ID NO: 69491 - DNA, 606 bp, Neisseria meningitidis; identical to SEQ ID NO: 60430

SEQ ID NO: 69492 - DNA, 483 bp, Neisseria meningitidis; identical to SEQ ID NO: 36693

SEQ ID NO: 69493 - DNA, 1098 bp, Neisseria meningitidis; identical to SEQ ID NO: 60391

SEQ ID NO: 69494 - DNA, 2691 bp, Neisseria meningitidis; identical to SEQ ID NO: 55966

SEQ ID NO: 69495 - DNA, 1170 bp, Neisseria meningitidis; identical to SEQ ID NO: 55287

SEQ ID NO: 69496 - DNA, 360 bp, Neisseria meningitidis; identical to SEQ ID NO: 54332

SEQ ID NO: 69497 - DNA, 120 bp, Neisseria meningitidis; identical to SEQ ID NO: 43584

SEQ ID NO: 69498 - DNA, 1422 bp, Neisseria meningitidis; identical to SEQ ID NO: 60969

SEQ ID NO: 69499 - DNA, 810 bp, Neisseria meningitidis
atggcaaaaattggggattttgccgccaaatccatgatagagatacggagcaaacgaatgattaccctgccttccttaaacaatctgccgtcaaaatgggatgaaatccgctattggctcgaaacccgggtttgtgagtgcggcgttatgccgcatcccaatttgacggaatgcgaagccgggcagttcgatcgggatttttgggacaatatcggctgcgcgcctgaagaatatgtccgtatccgccgagccatccgtctgttggaagcgcgttatcccgacagtttgaatgagctggtgtgtgccgccattgccacgcctttgggcgagatgctggcggtgttcggaaataagggattgtgtctgctggagtttgtcggacagaaacatatggagcaggaaattgccgccgtccaaaaagccttgcgcggacggtttgtgtttcgggaggatgagcggacgcaacttttgcggcaggaattggacttatacttcaagggtcgtctgaaaacctttgccacgcctttggagcagattggcaccgagtttcaaaagcaggcatgggacgcgctcttggcgattccttacggcgaaacgcgcagctacaaagagcaggcgcagcgtttgggcaaccccaacgccgtccgcgccgttgccgccgccaacgggcagaacaaggtgtctatcttgattccctgccaccgcgtcatcggcagcgacggcaaactgaccggctacgcgggcgggttgaaccgcaaacagtttttactggctttggaacgcggcgaagttcagacggcattgttttaa

SEQ ID NO: 69500 - DNA, 828 bp, Neisseria meningitidis; identical to SEQ ID NO: 61283

SEQ ID NO: 69501 - DNA, 198 bp, Neisseria meningitidis; identical to SEQ ID NO: 36305

SEQ ID NO: 69502 - DNA, 966 bp, Neisseria meningitidis; identical to SEQ ID NO: 61049

SEQ ID NO: 69503 - DNA, 882 bp, Neisseria meningitidis
atgtgtatcgagatgaaatttatattttttgtactgtatgttttgcagtttctgccgtttgcgctgctgcacaaacttgccgatctgacgggtttgcttgcctaccttttggtcaaaccccgccgccgtatcggcgaaatcaatttggcgaaatgttttcccgaatggagtgaggaaaagcgtaaaaccgtgttgaaacagcatttcaaacatatggcgaaactgatgctcgaatacggcttatattggtacgcgcccgccgggcgtttgaaatcgctggtgcgctaccgcaataagcattatttggacgacgcgctggcggcgggggaaaaagtcatcatcctgtatccgcactttaccgcgttcgagatggcggtgtacgcgcttaatcaggatgtcccgctaattagtatgtattcccaccaaaaaaacaagatattggacgcacagattttgaaaggccgcaaccgctacgacaacgtcttccttatcgggcgcaccgaagggctgcgcgccctcgtcaaacagttccgcaaaagcagcgcgccgtttctgtatctgcccgatcaggatttcggacgcaacgattcggtttttgtggatttcttcggtattcggacggcaacgattaccggattgagccgcattgccgcgcttgcaaatgcaaaagtgatacccgccatccctgtccgcgaggcggacaatacggttacattgcaattctacccggcttggaaatcctttccgggtgaagacgcgcaagccgatgcgcagcgtatgaaccgctttatcgaagagcgggtgcgcgaacatccagaacaatatttttggctgcacaagcgttttaaaacccgtccggaaggcagccccgatttttactga

SEQ ID NO: 69504 - DNA, 1344 bp, Neisseria meningitidis; identical to SEQ ID NO: 61913

SEQ ID NO: 69505 - DNA, 630 bp, Neisseria meningitidis; identical to SEQ ID NO: 54824

SEQ ID NO: 69506 - DNA, 1215 bp, Neisseria meningitidis; identical to SEQ ID NO: 36211

SEQ ID NO: 69507 - DNA, 696 bp, Neisseria meningitidis; identical to SEQ ID NO: 46815

SEQ ID NO: 69508 - DNA, 1272 bp, Neisseria meningitidis; identical to SEQ ID NO: 55073

SEQ ID NO: 69509 - DNA, 258 bp, Neisseria meningitidis; identical to SEQ ID NO: 55886

SEQ ID NO: 69510 - DNA, 447 bp, Neisseria meningitidis; identical to SEQ ID NO: 50774

SEQ ID NO: 69511 - DNA, 552 bp, Neisseria meningitidis; identical to SEQ ID NO: 54731

SEQ ID NO: 69512 - DNA, 1386 bp, Neisseria meningitidis; identical to SEQ ID NO: 62046

SEQ ID NO: 69513 - DNA, 870 bp, Neisseria meningitidis
atgaaggagtggatagtgggtcaaagcggcgagttgttttgtttcggacagatgcccgtatggaaggcggaaaacctgccggaagttttgttgtcgggctattcgtccgaaggaggggaatgggtctgcctgaatgtgttgcagggcgatgtcgaagtccgcacgcaggacggggcggcggaggtttggtcggcagaaagcggcgattgcgtgtttgcgccgcagcaggtgttttcggtcaaaccgaaaacggacgatgccgaaatccgtttgtcgatgtattgtgtggccgaagattatttccacaaaaaatacggcatgagtgccacgcattctgcagtggcggcggctcaggatatcgtacctgcgggcagggcgctcgatatgggctgcgggcaggggcgcaacgcgctgtttctcggtttgaaggggtttgaagttactgcagtcgatcacaatcccgccgccttggcaaacgtggcggagctggcagaggcggagggtttgaacgtccgcacgctggaatatgatttgaacgccgccgccttgcagggcgagtttgattatattgtggcaacagtggtgctgatgttcctgatgccgcagcgcgtacccgacgtgattgccgatatgcaggcgcatacggcggcgggcgggtacaacttgattgtatcggcaatggatacggcggatttcccctgcccgatgccgttccccttcaaatttaaagagggagaactgaaggattattatcgggattgggagctggtcgaatataaagaagaattgggcgcgatgcacgccaaagacgaaaacggcaatccgatacggtttaaatttgtaaccatgctggcgaaaaggcctgaataa

SEQ ID NO: 69514 - DNA, 651 bp, Neisseria meningitidis; identical to SEQ ID NO: 55420

SEQ ID NO: 69515 - DNA, 378 bp, Neisseria meningitidis; identical to SEQ ID NO: 56102

SEQ ID NO: 69516 - DNA, 651 bp, Neisseria meningitidis; identical to SEQ ID NO: 41065

SEQ ID NO: 69517 - DNA, 3243 bp, Neisseria meningitidis
atgcaaaatatgaaaaaccaagtacgcggatcaggcatggatgcacgatccaatccggccaatgtttcagacggcctgcaaaacagttcgagccatatcggtaccaacacgcgctaccgcctgaccaagctcggcgaacaaatggcgcgcctgcccatcgacccgaaaatcgcgcgcattttgctggcggcgaagaaacacgactgtatggcggaaatattggtgattgcgtccgcgctgtcgattcaagacccgcgcgagcggccgttggaagcgcgcgatgctgcctccaaggcacacgaacgttttaccgacaagcagtccgatttccttgcctatctgaacatttgggacagcttccagcgtgagcgcgacaaaggtttgtccaacaagcagctggtgcagtggtgccgccaatatttcttgtcgcacctgcggatgcgcgaatggcgcgagctacaccaccagcttgcccaaactgcgattgaaatgggtttgaccaccaaagaagccgctttcagacgttctcccgaagtcaggcagctcacgtcgtctgaaaatgcaggcgaccaagacctatccgccaaactcaaacaaaaacaactggataagaaacaacaccgcgcccaaatccgcgctgccaaagaagcgggctacgaacaaatccaccgcgccctgctcaccggcctcatcgccaacgtcggcatgaaatcacccgacggcaacgactacaccagcacgcgcggcagccgcttccaccttttccccgcctccgccctgttcaaggcgaagcccaaatgggtgatggcggcagaactcgttgaaacgacaaaactttatgcccgcgacgtagccgccatccagcccgaatggatcgagcaggaagcgccgcacctcgtccgctaccactatttcgagccgcattgggaacaaaaacgcggcgaagtcatcgccagcgaacgggtaacgctctacggcctgaccgtcctgccgcgccgccccgtgtcctacggcagaatcgcccccgaagaagcgcgcgaaatctttatccgcggcgcattggtggcacaggaatgcgatttgaaagcggacttttttgtccacaacaaaaagctgattaaagaaattaccgaactcgaacacaaatcgcgcaagcaagacgtgctggtcgatgacgaagccctgtttgcgttttataacgaacgactgcccgaaatggcttggaaagacgcgcaaggcagcgtttggggaagtgaagattccgtacggattattgaatctgacaaagccgagaggtcgtctgaaaatgagcgcaacgagtttcgtaaaaacaagcgtaatgggtctcgccaaaatgaaaatcacggcaacaccgtaggttgggttgaaaacccaacatcagccgcaactgcaaaaactgttgggtttgacaacccaacctacgctactcagcaacccaccccctcccccgagagggagggtcggggagagggcaaaacagttgccgcacaaaccaacttttccgcaaccgcagcaaaccctctcccgcaggagagggaacagagtgcctcagcttcaacgttttcagacgacctgcgtcctgcaaatctgcagcaaaccgccccctcccccgtgggggagggctggggagagagcaaaacagttgccacccaaaccaacttttccgcaacctcaacactttcagacgaccccaaacccaaaaagcagcctgcacctcaaaaaggccgtctgaaacccctacccctcgccgacatccgcaccttccaagcctggctcaaaaccgccgagtgcgacaatccgcgcctgctgttcctcagccgcgacgatctgatgcaacacgccgccgcacacattaccgaagaacagttccccaaattctggcaaaccgcagacggcaaattcaaactttcctaccgcttcgagccgcaccatccgctagacggcgtgaccatgaccgtgccgctgaccgtcctcaaccgcctgcacgcgccatcgctcgaatggctggtgcccggtatgttgcgcgaaaaaatccagctgctgattaaagcactgccgaagcaaatccgccgcatttgtgtgcccgtacccgatttcatcaccaaattcctcgaaagcaatcccgaccgccaagcgaccatcattccccagttggcgcactttatcgccaaaagcgccagcgatatgcggattctcgagcaaatcgaccaagacgcatgggcggcgcaagaattgcccgaacactgctatctgaatctgcgcattatcgacgacggcggacaagagcttgccggcggccgcaaactgcacgaattgcaacaacagctcggccaagccgccgccgtcaccttccgcgacaacacccaagaattcgagcgcgacaacgttaccacatgggacatcggaaccctgcccgaatccatcaaattcgcccgcggcaaacaacagctcaccggctacctcggcctgcaaaaagaaaaagacggccgcatcgccctgcgcctgtttgacaccaccgaagccgccgaacaggcacaccgtcaaggcgtcatcgaattgatgaagctgcaattaaaagagcaggtaaaagacctgaacaaaggcatccaaggcttcacccaagccgccatgctgctcaaacacatcaacgccgacaccctgcgcgacgacctcacccaagccgtctgcgaccgcgcctttatcggcgaagacgagctgccgcgcaacgaaaaagccttcaaagaacaaatcaaacgcgcccgtagccgcctgcccgccgtcaaagaagccctcagccgctacctgcaggaaaccgcagccgcctacgccgaactcaacggcaaactcggcaaacatccattgacccacctcctaagactacgcctgcaaaccctgcttgcccccggcttcgccacccgcaccccgtgggcacaatggccgcgcctccccatctacctcaaagccatgaccctgcgcctcgaaaaatacagcagcaaccccgcccgcgacgcagcccgcgaagccgatatacaggaattggaacaaatgtggcaggaaaaaaacgacggtttggtgaaacaaggacaacccatttcagacaacctagccgcgtttaaatggatgattgaagaattgagagtgtcactgttcgcacaggaattgaagacaccgtatccagtgtcggtgaagaggttgttaaaagagtgggagaaaattttttaa

SEQ ID NO: 69518 - DNA, 1158 bp, Neisseria meningitidis; identical to SEQ ID NO: 61687

SEQ ID NO: 69519 - DNA, 282 bp, Neisseria meningitidis; identical to SEQ ID NO: 38303

SEQ ID NO: 69520 - DNA, 546 bp, Neisseria meningitidis; identical to SEQ ID NO: 38361

SEQ ID NO: 69521 - DNA, 600 bp, Neisseria meningitidis; identical to SEQ ID NO: 61911

SEQ ID NO: 69522 - DNA, 1857 bp, Neisseria meningitidis
atgatgaaccgttatcctttatggaaatatctgctgattgtgttcacgattgcggttgccgcagtgtattcgctgcccaacctattcggcgaaacacccgccgtgcaggtatcgaccaaccgacaagccatcatcatcaacgaacagactcaattcaaagtggatgccgcgctgcaaaacgcgggtattcagaccgacgggatgtttgttgtggacaattcactgaaagtgcgtttcaaagacaccgaaacgcagcttaaagcgcgcgacgtcatcgaaaacactttgggcgaagggtatattaccgcgctcaacctgttggcggacagccccgaatggatggcgaaaatcaaagccaatccgatgtttttgggtttggacttgcgcggcggcgtgcatttcaccatgcaggtcgatatgaaagcggcgatgcagaaaacgtttgaacgttattcgggcgacatccgccgcgaactgcgccgcgaaaaaatccgcagcggcacggtgcgtcaggctggaaacagcctgaccgtccctttgcaggatgcaggtgatgtgcaaaaggctctgccgcagttgcgcaagctgtttcctgaagcaacgctgaattcagacggcagcaatatcgtcttgacgctttcggaagaggcggtcaataaagtgcgttccgatgcggtcaaacagaacatcactaccctgcacaaccgtgtgaacgagttgggcgtggccgaacccgtcatccagcagtccggtgccgaccgtatcgtcgtgcagcttccgggcgttcaggatactgccaaggcaaaagacatcatcggccgtaccgcgactttggaattgcgtatggtggaggacgatcctgccaagttgcgcgaggcattggaaggcaacgtgccgagcggttatgagctgctttcaagcggcggagatcgtcccgaaactctgctaatcagcaaacaggtcgagctgacgggcgacaacatcaacgatgcgcaaccgagtttcgaccaaatgggcgcacctgccgtcagtctgagcttggacagcgcgggtggcagcatttttggcgaactgactgccgcaaatgtcggcaaacgcatggcgatggttttgatcgaccaaggaaaatccgaggttgtaaccgcgccggttatccgtactgccattaccggcggacgcgtggaaatttccggaagcatgacgacagccgaagccaatgatacgtctttgctgttgcgtgccggttctcttgccgcgccgatgcagattgtcgaagaacgtaccatcggtccgtctttgggtaaggagaacatcgaaaaaggcttccattcgactttatggggttttgccatcgttgctgcattcatggtggtttactatcgtctgatgggtttcttttctaccattgcattgagtgccaacatactgttcctaatcggtattttgtctgccatgcaggcaacgttgacgttaccgggtatggccgcgctggcgttgactttgggtatggcaatcgactccaacgtcttgattaacgaacgtatccgcgaagaattgcgtgccggcgtgccgccgcagcaggcaatcaatctcggtttccaacacgcatgggcgaccattgtcgattccaacctgacttcgctgattgccggtatcgcgcttttggtattcggttccggcccggtacgcggttttgcggtcgtacactgtttgggtattctgacttcgatgtattcctccgtcgtcgtattccgtgcgttggtcaatctgtggtacggacgcagacgcaaattgcagaatatttccatcggtgcggtatggaaacctgaagccgaaactgcggcaggtaaggagtaa

SEQ ID NO: 69523 - DNA, 654 bp, Neisseria meningitidis; identical to SEQ ID NO: 36293

SEQ ID NO: 69524 - DNA, 195 bp, Neisseria meningitidis; identical to SEQ ID NO: 64731

SEQ ID NO: 69525 - DNA, 270 bp, Neisseria meningitidis; identical to SEQ ID NO: 36672

SEQ ID NO: 69526 - DNA, 1008 bp, Neisseria meningitidis; identical to SEQ ID NO: 44166

SEQ ID NO: 69527 - DNA, 966 bp, Neisseria meningitidis; identical to SEQ ID NO: 61349

SEQ ID NO: 69528 - DNA, 354 bp, Neisseria meningitidis; identical to SEQ ID NO: 39616

SEQ ID NO: 69529 - DNA, 801 bp, Neisseria meningitidis
atgagcccatccccctttatcgaaatgaaagacgtcgccttcgcgtatggcgaccgcccgattctgaagaacatcaatttcagcattccgcaaggcaattttgctgccgtaatgggcggttcgggcagcggcaaaaccacgctgatgcgactgattacaggacagattcgtccgcagtccgggcaggttttgattgaaggacgggatttggcgggcttttcggctgacgagttgtatgaacaccgccgccgtatgggcgtattgttccaacacggcgcgctgtttaccgatttgtctgtatttgacaatattgcttttccgatgcgcgaactgacgcgcctgccggaagcggtgattcgagatttggttttgttgaaactgaacgcggtcgggctgcgcggcgtggaaaacctgatgccgtccgagttgtccggcgggatgtcgcgccgcgtcgcgcttgcccgcacaatcgcgctcgatcccgaaattatgttgtacgacgagccgtttaccggtctcgatccgatttccttgggcgtgattgcccacttgatcagccgcgtcaacaaggctttgcgttcgaccagtattatggtcacgcacgacattgaaaaatctttggaaatcgtcgatcaggtgattttcttggcgcacggcgaaattatgttctccggctcgccgcaggaaatgcgcgaactggattcgccttgggtgcgccagtttgtcggcgggctggcagacggccccgtggcataccgttatccggcgcaaacgtcgttgcagcaggatttgctcgggtaa

SEQ ID NO: 69530 - DNA, 1536 bp, Neisseria meningitidis
gtgtctgattccaagacgaaagaacgcgccacattcggcacgcgccgcgcgtttatgattgccgccatcgggtccgccgtcggcttgggcaatatttggcgtttcccctatattgcttttgaaaacggcggcggcgcgttcatcctgccctatctggtcgcgcttctgacggcgggcatcccgctgctgctgctcgattatgccatcggccaccgttaccgtggttctgcgcccttggctttccgccgcctcggacgatggtttgagccggtcggctggtggaacgtgatgaccaatatcgtcatctgcatctattacgcggtaattatcggttgggcggcaagctatacctattattcggtcaacgccgcctggggtgcggatccgcagggttttttctttaaggacttcctgcaaatggagggcccggaagccttgggtttggattttgtcggcaaagtcgccggtcctttggcgggcgtgtgggtttttaccgccgccattatggcgttgggcgtgcaaaagggcgtggcgcgcgcctcgtcgttctttatgccgctgcttttggtgatgtttttgattatggtcggcatttcactaaccctgccgggtgcggcaaagggcttggacgcattgtttacgcccgactggtcgaaactcgccgattccaaggtctgggtggcggcatacgggcagattttcttttcgctttccatctgcttcggcattatggttacctattcttcttatttgaagaaaaaaaccgacttgggcggaacggggctggtggtcggttttgccaacagcagctttgaactgctcgcgggcatcggcgtgtttgccgcattgggctttatggcgcaggcgggcggtaaggcggtcaacgaggttgcctcaggcggcatcggtttggcgtttatcgcctttccgaccattatcaaccaggcaccgatgggctggctgatcggcatattgtttttcggttcgctggtattcgccggcgttacgtcgatgatttccatccttgaagtgattgtggcggcgattcaggacaagctgaacatcgggcgcgtcaacgccacgctgctggtctgcattccgatgggcattgtttccacgctgctgttcggtacggcgacggggctgccggttttggacgtgatggacaaattcgtcaacacctacggcattgttgccgccggctttgtttatgttgccgccatcatcatcagcggcaggctgccggaattacgcaagcacctgaacgctttgtcctccatccgcatcggcggcttgtggacggtctgcgtcgtggttaccgtcgtgatgctcggctatatgctgtttaaagataccagcggcctgatggagaaaaattacgaaggttatccggatggtttcctcagtattttcggctgggggatgtcggcggcgttggtcgtgttcgggctgctgctgtcgttgctgccttggaaacacggtcaggatttcaacgtcaaagacgaacacgaacatgaacaaggagaagaaaaatga

SEQ ID NO: 69531 - DNA, 993 bp, Neisseria meningitidis; identical to SEQ ID NO: 60734

SEQ ID NO: 69532 - DNA, 2283 bp, Neisseria meningitidis
atgacggtttttcggatttgctttattatccgtttatttttgaaatatctggggtggggagacgtgttccgtcgttggtttttgccgtgttgggttgtcggtgcggcggcttcgttcgcgctgccggtcgtgccgcattggctgttttggctggcggcttttgcggtttttgctgtgtttgcaaggcgttttgcgtttgccggtctgatgctgtgcgtgttggcgggcgcggcttacggcgtattcaggacggaggcggcattgtcttcccaatggtgggcagaagccgtttcaggcgtgcctttgacggtggaagtggcggatatgccgaggtcggacgggcggcgtgtgcagtttgcggcaaaggctgtggacagcggtggtcggacgtttgatttgctgctgtcggactacaaacggcgcgaatgggcggtcgggagcagatggcggataacggcacgtgtgcaccctgtcgtcggggagttgaacctgcgcggtttgaaccgtgaggcgtgggcattatccaacggaataggcggcgcggggacggtcggtgcggacagggttttgctgcatggcggaagcggttgggggattgcggtttggcgcagccgcatcagccgtaattggcagcaggcggatgcggacggcgggctttcagacggcatcgggctgatgcgcgcgttgagcgtgggcgaacagtcggcattgcgccccgaattgtggcaggcgttccggccgttggggctgacgcatttggtcagtatttcgggtttgcacgttacgatggtggcggtaatgtttgcgtggctggcgaagcggctgcttgcctgttccccgcgccttcctgcccggccgcgcgcgtgggttttggcggcggggtgtgcaggcgcgctgttttacgcgctgcttgccggtttttccgtgccgacgcagcgcagcgttttgatgttggcggcgtttgcgtgggcttggcgcaggggaagattgtcggcgtgggcgacgtggtggcaggcgttggcggcggtgctgctgttcgacccgtcggcggtcttgggtgtggggacttggctgtctttcggtttggtggcggccctgatatgggcgtgctcggggcgtttgcacgagggaaaacggcaaactgctttgcgcgggcagtgggcggcttcggtgttgtcgctggttttgctcggttatctgtttgcttcgctgcctttaatcagccctttggtcaatgcggtggcaattccgtggttttcttgggtattgacgccgctggcgttgctgggttcggtcgtgccgtttgcgcctttgcaacagttgggggcatttttggcggaatatactttgcggtttttggtgtggcttgccgatgtgtcgcccgagtttgccgttgcctccgcacctttgccgctgttggtgttggcggtgtgtgccgctttgctgttgctgctgccgcgcggcttgggtttgcgtccgtgggcggtgttgctgttggcagggtttgtgttttaccgttcacccggcgtgccggaaaatgaggttgcggttacggtttgggatgcggggcagggtttgtcggtgtcggttcagacggcaaatcatcatcttttgtttgacaccggaacggcagcggcggcgcagatggggattgtgccgagcttgaatgcgtcgggaatcaggtatttggattatttggttttgtcgcatcacgacagcgaccacgacggcggttttcaggcagtcggcaagataccgaacggcgggatttatgccgggcagccggaattttatgagggggcgcggcattgtgcggaacagcgttggcaatgggacggcgtggattttgagtttttgatgccgtctgaacgcaaaaacatcgatgataatgggaaaagttgtgttttgcgtgttgtggcgggcggtgcggcactgctggtaacgggcgatttggatacgaagggcgaggaaagcctggtcggcaagtatggaggcaacctgtacagccaggttttggttttgggacatcacggcagcaatacgtcctcgtcgggcgtgttcctcaatgccgtctcgcccgaatatgccgttgcttcaagcggttatgccaacgcctacaaacatccgaccgaagcggtgcagaaccgtgtccgcgcacacggcatcaaactgctgcgtaccgatttgtcgggcgcactgcaattcggcttgggacgcggcggcgtgaaggctcaacgtttgagagggtataaattctattggcagaaaaaaccgtttgaatga

SEQ ID NO: 69533 - DNA, 225 bp, Neisseria meningitidis; identical to SEQ ID NO: 61071

SEQ ID NO: 69534 - DNA, 312 bp, Neisseria meningitidis; identical to SEQ ID NO: 42205

SEQ ID NO: 69535 - DNA, 1125 bp, Neisseria meningitidis; identical to SEQ ID NO: 61170

SEQ ID NO: 69536 - DNA, 2037 bp, Neisseria meningitidis; identical to SEQ ID NO: 61129

SEQ ID NO: 69537 - DNA, 558 bp, Neisseria meningitidis; identical to SEQ ID NO: 60463

SEQ ID NO: 69538 - DNA, 891 bp, Neisseria meningitidis; identical to SEQ ID NO: 60900

SEQ ID NO: 69539 - DNA, 384 bp, Neisseria meningitidis; identical to SEQ ID NO: 60642

SEQ ID NO: 69540 - DNA, 2043 bp, Neisseria meningitidis; identical to SEQ ID NO: 54970

SEQ ID NO: 69541 - DNA, 174 bp, Neisseria meningitidis; identical to SEQ ID NO: 55983

SEQ ID NO: 69542 - DNA, 957 bp, Neisseria meningitidis; identical to SEQ ID NO: 61227

SEQ ID NO: 69543 - DNA, 288 bp, Neisseria meningitidis; identical to SEQ ID NO: 41116

SEQ ID NO: 69544 - DNA, 357 bp, Neisseria meningitidis; identical to SEQ ID NO: 55433

SEQ ID NO: 69545 - DNA, 963 bp, Neisseria meningitidis
atgcccagtatctctgtccgccgactgtttgacgacaaccaatacaagttgcaacttgcctgggccgccggcaattcgggtgcggacaaccgtatcggcgtagaggcggacaagcccgtcctcgctttggtcggacacctgaatttcatccaccccaaccaaatccaagtggtcggtttggcggagtcggaatatctgaaccgtctcgaatcgggggaaacgggttatcagttcggcgacctgttcgacatttctatgtctttggttattgtggcaaacggcttgccggtttccccgggactgcgcgactactgccataaaaacgatattccactgctgacttccaaactcgaaagcccctatctgatggacgtgttgcggatttacctgcaacgcaccctggcggcatcgtccgtcaaacacggcgtatttctcgatgtgtttgaaatcggcgtgctgattaccggacattcgggtttgggtaagagcgaattggcgttggagctgatttcgcgcggccacagcctgattgccgacgatgcggtcgagctgttccgcatcggcccggaaacgctggaagggcggtgttcgcctatgctgcgcgattttttggaagtgcgcggcttggggatactcaatatccgccatattttcggcgaaacttccatccgccccaaaaaaatcctgcaactcattatcaatttggtcgaggcagacgacgagtatatgaagcagctcgaccggttgagtatccgcaccgaaaccgaatccatcctcaacgtcaacgtccgttcggtaacgctgcctgtcgcggtcggacgcaaccttgccgtattggttgaagcggcggtacgcaattacattttgcagttgcgcggtaaggacagtacgcgcgaatttttggaacgccatcagacgcaacttaaagaaaacgaacagaatcatgaaaatcgtcctgattag

SEQ ID NO: 69546 - DNA, 948 bp, Neisseria meningitidis; identical to SEQ ID NO: 54669

SEQ ID NO: 69547 - DNA, 720 bp, Neisseria meningitidis; identical to SEQ ID NO: 50970

SEQ ID NO: 69548 - DNA, 1179 bp, Neisseria meningitidis; identical to SEQ ID NO: 55445

SEQ ID NO: 69549 - DNA, 1098 bp, Neisseria meningitidis; identical to SEQ ID NO: 54808

SEQ ID NO: 69550 - DNA, 246 bp, Neisseria meningitidis; identical to SEQ ID NO: 61264

SEQ ID NO: 69551 - DNA, 1383 bp, Neisseria meningitidis; identical to SEQ ID NO: 55427

SEQ ID NO: 69552 - DNA, 342 bp, Neisseria meningitidis; identical to SEQ ID NO: 61555

SEQ ID NO: 69553 - DNA, 156 bp, Neisseria meningitidis; identical to SEQ ID NO: 41797

SEQ ID NO: 69554 - DNA, 1071 bp, Neisseria meningitidis; identical to SEQ ID NO: 42097

SEQ ID NO: 69555 - DNA, 279 bp, Neisseria meningitidis; identical to SEQ ID NO: 36930

SEQ ID NO: 69556 - DNA, 471 bp, Neisseria meningitidis; identical to SEQ ID NO: 55860

SEQ ID NO: 69557 - DNA, 606 bp, Neisseria meningitidis; identical to SEQ ID NO: 50131

SEQ ID NO: 69558 - DNA, 435 bp, Neisseria meningitidis; identical to SEQ ID NO: 55248

SEQ ID NO: 69559 - DNA, 1293 bp, Neisseria meningitidis; identical to SEQ ID NO: 38975

SEQ ID NO: 69560 - DNA, 1086 bp, Neisseria meningitidis; identical to SEQ ID NO: 43799

SEQ ID NO: 69561 - DNA, 2472 bp, Neisseria meningitidis
atgaaaaaaacctgtttccactgcgggctggatgttcccgaaaacctgcatctgaccgtccgctacgaaggcgaagaccgagaaacctgctgcgccggctgtcaggcggtcgcacaaagcattattgacgcgggcttgggcagttattacaaacaacgcaccgccgacgcgcaaaaaaccgagctgccgccccaagaaatcctcgaccaaatccgcctgtacgacctgcccgaagtccagtccgactttgtggaaacccacggcggcacgcgcgaggcggttttaatgctcggcggcatcacctgcgccgcctgcgtctggctgatcgaacagcagcttttgcgtacagacggcatcgtccgcatcgacctcaattacagcacgcaccgctgccgcgtcgtctgggacgacggcaaaatccgcctttccgatattctgttgaaaatccggcagataggctacaccgccgcaccctatgacgcgcaaaaaatcgaagccgccaaccaaaaagaacgcaaacaatacatcgtccgcctcgccgttgccgggctggggatgatgcagacgatgatgttcgcgctgccgacctacctttacggcggcgatatcgaacccgatttcctgcaaatcctccattggggcggctttttaatggtgctgcccgtcgtattttattgcgccgtcccgttttatcaaggcgcgttgcgcgacctgaaaaaccgtcgggtcggtatggacacgccgattaccgtcgccatcattatgacctttatcgccggcgtttacagccttgcgacaaatgcggggcaggggatgtatttcgaatccatcgcgatgctgctgtttttcctgctgggcggacgctttatggaacacattgcctgccgtaaggcaggcgatgccgccgagaggctggtgaagctgattcctgcgttttgccatcatatgcccgattaccccgatacgcaggaaacctgcgaggcagctgtcgtcaaattgaaagcgggcgatatcgtgctggtcaaaccgggcgaaaccatccccgttgacggcacggtgctggaaggaagcagtgccgtcaacgaatctatgctgaccggcgagagcctgcccgtcgccaaaatgccgtctgaaaaagtaaccgccggcacactcaacacgcaaagccccctgattatacgcaccgaccgcaccggcggcggcacgcgactgtcgcacatcgtccgcctgctcgaccgcgccttagcgcaaaaaccgcgcactgccgagttggcggaacaatacgcctcgtctttcatattcggcgaactcctgcttgccgtccccgtcttcatcggctggacgctgtacgccgacgcgcacaccgcattgtggattaccgtcgccctgctggtcattacctgcccctgcgccttatcgcttgccacgccgaccgcgctggcagcttctaccggtacgctggcgcgcgaaggcattttaatcggcggaaagcaggcaatcgaaaccctcgcccaaaccaccgacatcatcttcgacaaaaccggcacgctgacccaaggcaaacccgccgtccgccgtatctcattgttgagaggcacagacgaagcctttgttctcgcggtggcgcaggctttagaacaacagtccgaacatccccttgcccgcgccatcctcaactgccgtgtttcaagcggcagcgtccccgacatcgctattaaacaacgcctcaaccgcatcggcgaaggcgtgggcgcgcaactgaccgtcaacggcgaaacacaggtttgggcattgggcagggcatcctatgtcgccgaaatttcaggtaaagaaccgcaaacagaaggcggcggcagcgcggtttacctcggcagtcaaagcggtttccaagccgtgttctacctgaccgaccccttgaaagacagcgcggcggaggcggtgcggcagttggcaggcaaaaacctgaccctgcacatcctcagcggcgaccgcgaaaccgccgttgccgaaaccgcacgcgccctgggtgtcgcgcactaccgcgcccaagccatgcccgaggacaaactggaatacgtcaaagccttgcaaaaagaagggaaaaaagtgctgatgataggcgacggcatcaacgacgcgcccgttttggcgcaggcagacgtatccgccgccgcagcgggcgggacggatattgcgagggacggcgcggacattgtgttattgaacgaagatttgcgtaccgtcgcccacctgctcgatcaggcgcggcgcacccgccatattatccggcaaaacctgatatgggcgggcgcgtacaatatcattgccgtaccgcttgccgttttgggctatgtccaaccgtggattgccgcactgggtatgagcttcagttcgctggtcgtattgggcaatgctatgcggcttcacaagcaggtggacatgccgtctgaaaaaatgccgtccgaacaatga

SEQ ID NO: 69562 - DNA, 1266 bp, Neisseria meningitidis; identical to SEQ ID NO: 61537

SEQ ID NO: 69563 - DNA, 747 bp, Neisseria meningitidis; identical to SEQ ID NO: 60706

SEQ ID NO: 69564 - DNA, 270 bp, Neisseria meningitidis; identical to SEQ ID NO: 40667

SEQ ID NO: 69565 - DNA, 1155 bp, Neisseria meningitidis; identical to SEQ ID NO: 55962

SEQ ID NO: 69566 - DNA, 222 bp, Neisseria meningitidis
atgcgtttatctttatatggttgtttttattttacattttctttcgtttgggtgtggtttgaggaagcaggggattaccgttttttgtcagcagtgttgaaaattgtcagttttagtgccgattttcggcacttttttattggcgtggggtatctctattggcatggggcatcgggtgtgttgattgggtcggaatttgagatttttgaatttgcgcggtag

SEQ ID NO: 69567 - DNA, 297 bp, Neisseria meningitidis; identical to SEQ ID NO: 38749

SEQ ID NO: 69568 - DNA, 1893 bp, Neisseria meningitidis; identical to SEQ ID NO: 61730

SEQ ID NO: 69569 - DNA, 723 bp, Neisseria meningitidis; identical to SEQ ID NO: 60363

SEQ ID NO: 69570 - DNA, 966 bp, Neisseria meningitidis; identical to SEQ ID NO: 60806

SEQ ID NO: 69571 - DNA, 1446 bp, Neisseria meningitidis; identical to SEQ ID NO: 62010

SEQ ID NO: 69572 - DNA, 1911 bp, Neisseria meningitidis
atgaatatattatctgtagaaaacgcttcttttgccatcggccacgttgccttgctcgacaaaacttcttttcaactcgacagcggcgaaaaagtcggcttgatcggacgcaacggcgcaggcaagtcttcgtttttaaaaatcctcgccggcgtgcaaaagctcgacgacgggcagattattgttcaaaacaacctcaaaatcgtttatgtaccgcaggaatccttttttgataaggacgcaaccgtatttgataccgttgccgaaggtttgggtaaaattcgcgatttattgcgccgttaccaccgcgtcggtcatgagttggaaaacggttcgggtgaggctttgttgaaagaactcaacgaattacaacttgaaatcgaagcgaaggacggctggaagctggatgcggcagtcaagcagactttgggcgaactcggtttgccggaaaacgaaaaaatcggcaacctttccggcggtcagaaaaagcgtgtcgccttggcgcaggcttgggtgcagaagcccgacgtattgctgctggacgaaccgaccaaccatttggatattgacgcgattatctggttggaaaacctgctcaaggcgtttgaaggcagcttggtcgtgattacccacgaccgccgttttttggataatatcgctacgcggattgtcgaacttgaccgcggcattctacgttcctatcccggctcgttctctaaatacagtgagaaaaaagcgcaagagttggcagtcgaggcggaacataaccgcttgtttgacaaatttcatgctcaggaagaagcgtggatacgcaaaggcatcgaagcgcgacgtacccgtaacgaaggacgcgtgcgccgtttggaagagctgcgccgccaacgtgcagaacgccgcaacgtgcagggacaggtcaactttaagctcgatagcggtgagaaaagcggcaaaatcatcgccgaattggaacacgcttcgtttgcctatggcggcaaagtcattatggacaaattctccgccatcttgcagcgtggcgacaaaatcggcttaatcggcccaaacggtatcggcaaaaccaccttcctcaagctgattttgggcgaattgcagccgacctacggcagaatccgtatcggcagcaagcaggaagtcgcctatttcgaccagttccgcagcgcgttgaatgaaaacgaaaccgtgttttacacgctcggacagggcaatgattacgttgaagtcggcggtaagaaaaagcatgtgatgagctatttagaagatttcctgttcccccctgcccgcgcgcaaagtcctgtttcttcactctctggcggcgaacgcaaccgccttttgctggcaaaactctttacccgtcctgctaatattttgattttggacgaaccgaccaacgacttggatatcgatacccaagagctgcttgaagatttgctgcgcgattatcaaggcacggtattccttgtctcacacgaccgtatgttcctcgataacgtgattacccaaagcattatttttgaaggaaatggaaggttaaaagaatatatcggcggctatcaggactacatcgacgcaaaatcacgcgaagcgaagattcagacggaatccgcacccaaaacagccgatgccgaaccggtgaaagaaaaacccaaagccaaccgcacggtcaaactgtcctacaaagaacagcgcgaactcgacgccctgcccgacgaaatcgccgccttggaagccgaacaggcagaaatcaacgcgcagctttccgatcccgaaatcttcaaagattacgaaaaagccggcgcactgcaaagccgcgccgaagaaatcgaaatgctgcttttggaaaagctggaacgctgggagctgctggaaaccaaacagaacggcaatgccgtctga

SEQ ID NO: 69573 - DNA, 390 bp, Neisseria meningitidis; identical to SEQ ID NO: 39510

SEQ ID NO: 69574 - DNA, 1218 bp, Neisseria meningitidis; identical to SEQ ID NO: 61655

SEQ ID NO: 69575 - DNA, 267 bp, Neisseria meningitidis
ttgaaacggcaaaccgtcaatcaagcaaccgcgtgcgtgcgtaccgcacacaccctacacgttgattttgaagttccgtgtaattcacaggtagggtgtgtggcgcagccacgcacgcggtgttgggtatgcaggctacggcttgctgctgcagaaactcctgaagaaaaagccaaagacgccgctgaagaggctaaagaagaagcaaaagacgcagcggaagatgccaaagaagctgctgaagacgctaaagaagaagctaaataa

SEQ ID NO: 69576 - DNA, 600 bp, Neisseria meningitidis; identical to SEQ ID NO: 54214

SEQ ID NO: 69577 - DNA, 1527 bp, Neisseria meningitidis; identical to SEQ ID NO: 61218

SEQ ID NO: 69578 - DNA, 1059 bp, Neisseria meningitidis; identical to SEQ ID NO: 60949

SEQ ID NO: 69579 - DNA, 906 bp, Neisseria meningitidis; identical to SEQ ID NO: 67105

SEQ ID NO: 69580 - DNA, 1059 bp, Neisseria meningitidis; identical to SEQ ID NO: 55416

SEQ ID NO: 69581 - DNA, 1296 bp, Neisseria meningitidis; identical to SEQ ID NO: 61374

SEQ ID NO: 69582 - DNA, 939 bp, Neisseria meningitidis; identical to SEQ ID NO: 60833

SEQ ID NO: 69583 - DNA, 270 bp, Neisseria meningitidis; identical to SEQ ID NO: 37651

SEQ ID NO: 69584 - DNA, 888 bp, Neisseria meningitidis; identical to SEQ ID NO: 50765

SEQ ID NO: 69585 - DNA, 447 bp, Neisseria meningitidis; identical to SEQ ID NO: 60895

SEQ ID NO: 69586 - DNA, 324 bp, Neisseria meningitidis; identical to SEQ ID NO: 55651

SEQ ID NO: 69587 - DNA, 1326 bp, Neisseria meningitidis; identical to SEQ ID NO: 43956

SEQ ID NO: 69588 - DNA, 3651 bp, Neisseria meningitidis
gtgaaatatttgatttcaggctgtctgaaaaataaaatgatgtggtgtgcatcaaaccgcgtgggcaacaagttgcccaccctacgcttgctagaccgaatggcaggtatttatatcacaggcaaagaaaaaggtgttttagcagcgcaggcaggcaaagacatcaacatcattgccggtcaaatcagcaatcaatcagagcaagggcaaacccggctgcaagcagggcgcgacattaacctagatacggtacaaaccggcaaacatcaagcaacccattttgatgccgataaccatgttattcgcggttcaacgaacgaagtcggcagcagcattcaaacaaaaggcgatgttaccctattgtcagggaataacctcaatgccaaagctgccgaagtcagcagcgcaaacggtacactcgctgtgtctgccaaaaatgacatcaacatcagcgcaggcatcaacacgacccatgttgatgatgcgtccaaacacacaggcagaagcggtggtggcaataaattgattattaccgacaaagcccagagccacaacgaaaccgctcaaagcagcacctttgacggcaggcaagttgtattgcaggcaggaaacgatgccaacatccttggcagcaatgttatttccgataatggcacccggattcaagcaggcaatcatgttcgcattggtacaacccaaactcaaagccaaagcgaaacctatcatcaaacccagaaatcaggattgatgagtgcaggtatcggcttcactattggcagcaagacaaacacacaagaaaaccaatcccaaagcaacgaacatacaggcagtaccgtaggcagcttgaaaggcgataccaccattgttgcaggcaaacactacgaacaaatcggcagtaccgtttccagcccagaaggcaacaatatcatccatgcccaaagcatagacattcaagcggcacacaacaaattaaacagtaataccacccaaacctatgaacaaaaaggcttaacggtggcattcagttcgcccgttaccgatttggcacaacaagcgattgccgtcgcacaaagcagcaaacaagtcggacaaagcaaaaatggtcgtgtcaatgccatggcagctgccaatgcaggctggcaagcctatcaaacaggtaagagtgcacaaaacttagccaatggtacaaccaatgccaaacaagtcagcatctccataacctacggcgaacagcaaaaccgacaaaccacccaagttcaagcaagccaagcccaagcgagtcaaattcaagcaggcggtaaaaccacattaatcgccacaggcgcagcagaacaatccaatatcaacatcgcaggctcagatattgccggcaaagcaggcacaatcctgattgccgataacgacatcacactccaatcagccgagcaaagcaataccgaacgcagccaaaacaaatcgacaggttggaacgcaggtgctgccgtatcattcggacaaggaggctggtcattaggcgttaccgcaggcggcaatgtcggcaaaggctacggcaatggcgatagcgtaacccaccgccatagccatattggcgacaaaggcagccaaacccttatccaaagcggtggcgacactaccatcaaaggcgcgcaagtacgcggcaaaggcgtacaagtcaatgccaaaaacctaagtattcaaagcgtacaagatagagaaacttatcaaagcaaacaacaaaacgccagtgcacaagtgaccgtaggttatggcttcagtgccagtggcgattacagtcaaagcaaaatccgagccgaccatgcttcagtaaccgagcaaagcggtatttatgccggagaagacggctatcaaatcaaggtcggaaaccatacagacctcaaaggcggcatcatcaccagcagccaaagcgcagaagacaagggtaaaaaccgctttcagacggccacccttactaccagcgacattcaaaattacagccaataccaaggaaaaagttttggattgggtgccagcgttgccgtaagcggcaaaacactgggacagggcgcacaaaataaacctcaaaacaaacacctgacaagcgtagccgataaaaacggcgcaagttcatcagtgggttatggcagcgacagcgacagtcaaagcagcatcacgaaaagcggcatcaacacccgcaacatacacatcaccgacgaagcgggacaaatcaggctgacaggcaaaacagcggcacaaaccaaagccgatattgatacaaacgtaaccacagacaccgccgaacgacattcgggcagcttgaagaacaccttcaacaaagaagcggtgcaaagtgaactggatttacaaagggaagtaacccaagagtttgataaaactagacaaggagtgaaacaagaactttatgcagtagtagatagcaaacgagagcaagccacaaaagagagactcaaaaatggtggatatgacaatgataaatctagagcattaaataaggaagctaatgaattagatgaaaaaattcgttggcttgatgcgggattaggactcgtttggggagcagggagttctgatatggcttggagtatgtttgccacaacccaagccgatagagcggtaaggtctgcaactgcacctaaagaaatgtggttccataagaagataatagatgaaaaaacaggtaaagtatcctttgataccagacaaatttggtcattgaatgatttaagcaaggaagaactggcaagcattcaagacacaaatggcaaagttattactgtgtctaatcctggtattttcaataatcgagaagattcattaagcaatgcagcaaaacaaaatcgtaatagtacaaacggtagtggtgttattgcagttatgaatcctccaacagggaaatataaatctgattctaataacaaaataaaagattctttatggctcagttcaagtcttgtttctgaactgatgtatgtcggttacgaccaattaaataataaagtgttccaaggctatttacccaaaaccaattcagaaaaactgaatcaagatatttatcgagaggttcaaaaaatggataatggctggtctgttgataccagtaaccacagtcgtgggggaattacagcaagcgtttccctaaaagattgggtaaacaataaagagcaaaatggcattgccccaatcagaaaagcacgtttctatggtacagccacaaatgtgaagaatgattacgccgatgttttacagaaaaacggctatacctatacgggtgcagacggtaaaacttataacagcggagcctactcaatcgtgcatgataaagattttgtggggaacaaatggatacctttcttgctaggaaataatgagacaacaaaaggagcttgtaagggattttgctattcgcatagcagttattttgcggaagtgcctgagcagtatcaaagagatgaaaatgggaatattaaaatggaaaatgggaaacctgttgaaacagaaaactgggaagattacacaaaaaaatggggaatccctaaaacaggtgctgatggtaaatatataaatcatgctattccaaaattagtcaatcccaataatccgaatggagaaaaatatgaaacaaatcctttttaa

SEQ ID NO: 69589 - DNA, 2157 bp, Neisseria meningitidis
atgcccgccccccaaccttccgccccttacgaccccctgaccgccgaagcgcgtgccctgcttttccataccgcctcctacctcaagcccgaggaacaggcggagcttgaaaaagctgtcgcctatgcgtttcgtgcccacgacgggcaaacccgcaaaagcggggagccctacatcacgcatccgattgccgttgcgacgcagctcgccctttggcatatgggcatacagggtctttgtgcaggcgtgatgcacgacgtattggaagatacgggcgtgacaaaaggggaaatggcggcggtgttcggcaatacgattgccgagatggtggacgggctgtccaaactcgagaaactcaaatttgaagatcatgcggaacatcaggcggagagtttccgcaaactgattttggcgatgaccaaagatgtgcgcgtcatcgtcgtcaaacttgccgaccgcctgcacaatatgcggacgctcggttcgatgcgcccggacaaacgccgccggattgcaagggaaacccttgaaatctatgcacagattgctaaccgtataggtttgaataacgcatatcaagagcttcaggatttatcgttccaaaacctgcatcccaaccgctacgagactttaaaaaaagcgatggacaagagccggaagaaccggcaggacgttgtcggcaaagtcttgcgcgcattcggccagcggctggtaggcgcgaatatagaggccaaaatcaaaggcagggaaaaaaacctgtacggcatccatcagaaaatgatggcgaaaaagctgcgctttgccgaggttatggatatttacggtttccgcgtcattgtcaacagcattccagcctgttatgccgcactcggcgcattgcacaccctctatcagcccaagcccgggcggttcaaagactatatcgccattccgaaaagcaacgggtatcaaagtctgcatacgactttggtcggtccttacggcttgccgattgaagttcagatacgtaccaaggaaatggatgctgttgccgaaggtggaatcgccggacattggagctataaatcatattctaagacggtcgatcaggcggtgcttcacacaaaccggtggctgaaaaatatcttagatttgcaggcaagcagtgccaatgccattgagtttctcgaacacgtcaaagtcgatttgtttccgaacgaaatctacatccttacgccaaaaggaaaaatcctaactttgcccaaaggggcaacgcctgtcgattttgcttatgcggtgcataccgatatcgggcacaaaaccgttgccgcacgtatcaacaatatcatgatgccgttgcgtacgaagctcaaaaccggtgattctgttgaaattatcacatccgaacacgccaaacccaatcccgcgtggttgaatttcgccgtgtcaggcagggcgcgcagtgccatacgccaatatattaaaaaccttaaccggcacgatgcggtcgttttgggagagagcctcttacaaaaagccctgtccagtttgctgcccaaagatgtcctgctttcagacggcatcaaggaaaaatatcttgccgatctcaacgacaaacagacttcatttgaggaagtgctgtacaacgtcggtatggggcataccctgcctgtttatgtcgccatgcacattgccgagttggcaggggagcatttcggtagcgaggtcaggctcagttccattaaagtcgatggtcaggaaagcgggcatattcattttgcagagtgctgccaccctgttcccggcgattccatccgtttgctgttggttaagggaaaaggcatgattatccatagggatacctgcccgacgttgttgaagtccgatcccgaacagcagctggatgcagactgggaaaatatgaacgggcagaactaccgtgtcgggcttcaagtccaatcggaagacagccacggcttgctggcattaatggcgcaagcgatttccgattccggtgcggacattgagtcggtcgaaacaccgtctaaatcccagtcgggaacggaaggttttgtcgaattcaaattcttattgaaagtcaagaatctgaatcaattgaatcagattattcaaaatctgcatagtattccatatatccgcaaagtcatcagaagttga

SEQ ID NO: 69590 - DNA, 1146 bp, Neisseria meningitidis; identical to SEQ ID NO: 55157

SEQ ID NO: 69591 - DNA, 843 bp, Neisseria meningitidis; identical to SEQ ID NO: 55873

SEQ ID NO: 69592 - DNA, 1812 bp, Neisseria meningitidis; identical to SEQ ID NO: 55230

SEQ ID NO: 69593 - DNA, 504 bp, Neisseria meningitidis; identical to SEQ ID NO: 54429

SEQ ID NO: 69594 - DNA, 489 bp, Neisseria meningitidis
atgaagaaagatattttttattgtgagcagtggtcttatggttataagaaacttcataagcctttttctgagaaacaagctgaggaaaaacatcttaaaggggagttatatactgccgtaataggttcggcgacacaacctgaatatgtaattaccttgcgagaggaagtaggttttttttcggtacattttttcgataaatttggaagggattatttaacccatcaatttcaaaaatattccaattcgaattattattttctttctatggctgtatggagagattatataactttggaatctcatgacttagcagaaggatatacttatttcttcaatgaaaatacggatgattgctatgttttgaaagaggattttattaataatgagcgatatgaaaaaacagaattatattcccaaaaagataaggtaattctatttccaaagtttggtgaatatgatttggtgttaaatccggacattatttaa

SEQ ID NO: 69595 - DNA, 987 bp, Neisseria meningitidis; identical to SEQ ID NO: 55148

SEQ ID NO: 69596 - DNA, 921 bp, Neisseria meningitidis; identical to SEQ ID NO: 61104

SEQ ID NO: 69597 - DNA, 381 bp, Neisseria meningitidis; identical to SEQ ID NO: 60875

SEQ ID NO: 69598 - DNA, 621 bp, Neisseria meningitidis; identical to SEQ ID NO: 62155

SEQ ID NO: 69599 - DNA, 1398 bp, Neisseria meningitidis
atgactgtccgtatcgaacacgatttattgggcgaccgcgagattcccgccgaagtgtattggggcatccacaccctgcgcgccattgaaaactttaaaatctccacacaaaaaatttctgacgtgccgcagtttgtccgcagtatggtgatggtgaaaaaggcgacggcacaggcaaacggtgagttgggcgcggtcaagcccgaaatcgccgccgccattgaaaaagcctgcgacgaagttctgctgaacaaccgctgcctcgaccaattcccgtccgacgtgtatcagggcggtgcgggtacttcggtcaatatgaacaccaacgaagtcatcgccaacctcgcattggaagtcttgggatacgaaaaaggccgctacgacatcgtcaatccgatggatcacgtcaatgccagccaatcgaccaacgatgcctatcccacgggcttccgccttgccgtgtattacagcatcggcgaattgctcgacaaactgactgtcctgaaaaacgcctttgccgccaaagccgaagaatttaaagacgttttgaaaatgggccgcacccagcttcaagatgccgtgccgatgactgccggccaagaattccaatctttccaagtgttgttggaagaagaaatcctcaacctcgaccgcacccgccaactgctgttggaagtcaatttgggcgcaacggcaatcggcacgggcgtgaacacgcccaaaggctacgccgaactggtggtcaaaaaactctccgaagtcagcggcttgccttgcaaactgaccgaaaacctgattgaggcgacctccgactgcggcgcatatgtgatggtacacggcgcattgaagcgcacggcggtcaaactctccaaaatctgcaacgacttgcgcctgctctcttccggcccgcgtgccggcttgaaagaaatcaacctgcccgaattgcaggccggttcttccataatgcccgccaaagtcaatcccgtgattcccgaagtggtcaaccaagtctgcttcaaagtcatcggcaacgacacgacgattaccttcgccgccgaagccgggcaactgcaattaaacgtgatggagccggtcatcgcccaatgtatgtttgaaaccatttccctcttgggcaatgccgcagtcaacctgtccgacaaatgcgtcaaaggcattacggtcaaccgcgaaatctgcgaacgttacgttttcaactccatcggtttggtgacttatctgaatccgtatatcggacaccacaacggcgatttggtcggcaaaatctgcgcccaaaccggcaaaggcgtgcgcgaggttgtcttggaacgcgggctgttgagcgaagaagaactcaaccgcatcctctctcccgagaacctgatgaacccccatctgtaa

SEQ ID NO: 69600 - DNA, 1434 bp, Neisseria meningitidis; identical to SEQ ID NO: 60976

SEQ ID NO: 69601 - DNA, 666 bp, Neisseria meningitidis
atggatgcatggtttgaagatacggcgatggggcggtatgttgcaaaattggaacaggacttcttcgggcggtatctagattcataccgtttttcgggaatgtgtgcggttcaggtgggcggtccgtggctgagcctgtctgaagatgttgtctgtgtgccgcgagatatgtcgatgtcggcggagaatatggctttggcggatgtttctgcggatatgctgctttttccgcatacgcttgaaggcggtgttccttcgcaaatcctgtcggaagcgcaccggatattgaaaccgtgcggacgtttgatgctgacgggtttcaatccgtattcgctctggggattcagccgttggtttgacggcgaacgcctgccggaaaaacggttttgtctgccgctgcccgagttgaaaaggctgcttgccgatgccggcttcgatattgaacttgggaaatttatggtgtatctgccgcccgtttcgtcgctcgggcaaatacgcttttggcagtttatggaaaaggcgggcgaccgttggtggccgcaatgtgccgcagtgtacggtctggttttggtcaaaagggcggcgggcgtaacgcccctgcccgcgtgggacgggtatttgggcggcaaagcccttgcggcgggtgcggcaaggattgcggattag

SEQ ID NO: 69602 - DNA, 540 bp, Neisseria meningitidis; identical to SEQ ID NO: 36581

SEQ ID NO: 69603 - DNA, 441 bp, Neisseria meningitidis
atgcctacccaatcaaaacatgcgtctatcaatatcagtctgatacaggcaagggaagccctgatgacccaattcaggcctattctgaatcaggcgaatattaccgatcagcaatggcggattatccgtcttttggcggaaaacggcacgctggactttcaagatttggcgaatcaggcgtgtattctgcgccccagcctgaccggtatcctgacccgccttgaaaaagcgggtttggtcgtccgcctgaaaccttccaacgaccaacgccgcgtttttctgaagctgactgccgagggcgagaagctgtatgaggaaatcggcgaagaagtggacgagcgttacgacgctatcgaggaagtgctgggccgcgagaaaatgctgctgcttaaagacctgttggcagaacttgccaaaatcgaggatgcgttgaactcgtaa

SEQ ID NO: 69604 - DNA, 966 bp, Neisseria meningitidis; identical to SEQ ID NO: 60806

SEQ ID NO: 69605 - DNA, 726 bp, Neisseria meningitidis; identical to SEQ ID NO: 43300

SEQ ID NO: 69606 - DNA, 579 bp, Neisseria meningitidis; identical to SEQ ID NO: 55170

SEQ ID NO: 69607 - DNA, 1056 bp, Neisseria meningitidis; identical to SEQ ID NO: 61483

SEQ ID NO: 69608 - DNA, 210 bp, Neisseria meningitidis; identical to SEQ ID NO: 43717

SEQ ID NO: 69609 - DNA, 810 bp, Neisseria meningitidis; identical to SEQ ID NO: 54386

SEQ ID NO: 69610 - DNA, 612 bp, Neisseria meningitidis; identical to SEQ ID NO: 54543

SEQ ID NO: 69611 - DNA, 786 bp, Neisseria meningitidis; identical to SEQ ID NO: 55907

SEQ ID NO: 69612 - DNA, 579 bp, Neisseria meningitidis; identical to SEQ ID NO: 61148

SEQ ID NO: 69613 - DNA, 183 bp, Neisseria meningitidis; identical to SEQ ID NO: 44130

SEQ ID NO: 69614 - DNA, 1044 bp, Neisseria meningitidis; identical to SEQ ID NO: 38337

SEQ ID NO: 69615 - DNA, 915 bp, Neisseria meningitidis
atgaaacacctcaaactcacccttattgccgcattgctaaccaccgccgcaactgccgcccccctgccggttgtaaccagcttcagcattttaggcgacgtagccaaacaaatcggcggagagcgcgtatccatacaaagtttggtcggagccaaccaagatacgcacgcctatcatatgaccagtggcgacattaaaaaaatccgcagtgcaaaactcgtcctgctcaacggcttaggacttgaagctgccgatgtacaacgtgccgtcaaacagagcaaagtatcctatgccgaagcgaccaaaggcatccaacccctcaaagccgaagaagaaggcggacaccatcacgaccacgatcatgaccacgaaggacaccaccatgaccacggcgaatatgacccccacgtctggaacgaccccgtccttatgtccgcctatgcccaaaacgttgccgaagccctgataaaggccgatcccgaaggcaaagtttattatcaacaacgcttgggcaactaccaaatgcagcttaaaaaactgcacagcgacgcacaagccgcatttaacgccgtccctgccgccaaacgcaaagtcctgaccgggcacgatgccttttcctatatgggcaaacgttaccatatcgaattcatcgccccgcaaggcgtgagcagcgaagccgagccttcagccaaacaagtcgccgccatcatccgccaaatcaaacgcgaaggcatcaaagccgtatttaccgaaaacatcaaagacacccgcatggttgaccgtatcgccaaagaaaccggtgtcaacgtcagcggcaaactgtattccgacgcactcggcaacgcgcccgcagacacctacatcggaatgtaccgccacaacatcaaagccttgaccaacgcgatgaagcaataa

SEQ ID NO: 69616 - DNA, 984 bp, Neisseria meningitidis; identical to SEQ ID NO: 62068

SEQ ID NO: 69617 - DNA, 1200 bp, Neisseria meningitidis; identical to SEQ ID NO: 54632

SEQ ID NO: 69618 - DNA, 1575 bp, Neisseria meningitidis; identical to SEQ ID NO: 56143

SEQ ID NO: 69619 - DNA, 1644 bp, Neisseria meningitidis; identical to SEQ ID NO: 61795

SEQ ID NO: 69620 - DNA, 747 bp, Neisseria meningitidis; identical to SEQ ID NO: 54893

SEQ ID NO: 69621 - DNA, 1377 bp, Neisseria meningitidis
atgcacgacaaaacctggtccggacgtttcaacgaacccgtttccgaactcgtcaaacaatacaccgcctccatcggtttcgaccgacggcttgccgaatgggacattcaaggctcgctggcacacgcgcaaatgttgaaagaaaccggcgtgttggacgaaggcgatttggcggacatccgtcggggcatggcggaaatcctcgaagaaatccgcagcggcaaaatcgaatggtcgtccgatttggaagatgtccacatgaacatcgaacgccgcctgaccgacaaaatcggcgacgcgggcaaacgcctgcacaccggccgcagccgcaacgaccaagtcgccaccgacatccgcctgtggctgcgtgaccagattaccgttatccaaagcctgattcaaaaccttcagacggcattgctggatttggcggaacaaaacgccgaaaccgttatgcccggctttacccacctgcaagtcgcccagcccgtcagcttcggacaccatatgctcgcctacgtcgaaatgctcggccgcgataacgaacggatggcggactgccgccgccgcgtcaaccgtatgccgctcggcgcagccgcccttgccgggacgacctacccgattcagcgcgaaattaccgccgagctattgggctttgaacaaatctgccaaaactcgctcgatgccgtatccgaccgcgattttgccgtcgagttcaccgccgccgcctcgctggttatggttcacctgagccgcctgtctgaagaattgattttgtggatgagtccgcgtttcggctttatcgacatcgccgaccgtttctgcacaggttcgtccatcatgccgcagaagaaaaaccccgacgtgcccgaactcgtgcgcggcaaatccggccgagtcatcggacaccttatcggcttgattaccctgatgaaatcgcagcccttggcgtacaacaaagacaatcaggaagacaaagaacctttgtttgacaccgccgacacgcttatcgacacgctgcggatttacgccgatatgatgcgcggcgtaaccgtcaaacccgacaatatgcgcgccgccgtgatgcagggttttgccaccgccaccgacttggcggattatctggttaaaaaaggtatgcccttccgcgatgcccacgaagtcgtcgcccaagccgtgcgccacgccgatgaagctggcgtcgatttgagcgaactgccgctcgaagtcttacaaggtttcagcgatttgattgccgacgacgtttacggcgtgctgacacccgaaggcagcttaaacgcgcgcaaccacttgggcggcaccgcgcctgaacaagtccgtttccaagtcaaacgctggcgggaaatgttggcttaa

SEQ ID NO: 69622 - DNA, 2751 bp, Neisseria meningitidis; identical to SEQ ID NO: 60929

SEQ ID NO: 69623 - DNA, 306 bp, Neisseria meningitidis; identical to SEQ ID NO: 54230

SEQ ID NO: 69624 - DNA, 1194 bp, Neisseria meningitidis; identical to SEQ ID NO: 54515

SEQ ID NO: 69625 - DNA, 852 bp, Neisseria meningitidis; identical to SEQ ID NO: 60802

SEQ ID NO: 69626 - DNA, 654 bp, Neisseria meningitidis; identical to SEQ ID NO: 44597

SEQ ID NO: 69627 - DNA, 360 bp, Neisseria meningitidis; identical to SEQ ID NO: 42625

SEQ ID NO: 69628 - DNA, 1110 bp, Neisseria meningitidis; identical to SEQ ID NO: 62094

SEQ ID NO: 69629 - DNA, 510 bp, Neisseria meningitidis; identical to SEQ ID NO: 55571

SEQ ID NO: 69630 - DNA, 780 bp, Neisseria meningitidis; identical to SEQ ID NO: 54674

SEQ ID NO: 69631 - DNA, 210 bp, Neisseria meningitidis; identical to SEQ ID NO: 40404

SEQ ID NO: 69632 - DNA, 1350 bp, Neisseria meningitidis
atgaaattaccggtgatgtcgcccgaacattcggcgcaacttcaggcgtttgaggcaaaaatcctgtccaatcacgccaaaatcgaggcgtggttccgcacgcagtggaacgcgcaccgcccgccgttttacggttcggtcgatatacgcaatgccggttacaaaatttcgtctatcgatatgaatttgttccccggcggcttcaataatctgaatcccaactttatcccgctggcggcggttgccgcgcaagatgcggtgcaacgcgcctgtgaaacggcgaaatccgtattgattattcccgaaaaccacacgcgcaatacgttttacctgcaaaacgtttacgccctcggcgagattttgtgttcggcagggtatgaagtgcgcttgggcagcctgaatccggaagtaaccgaaccgaccgaatttgaaaccgcattgggcgacaaaatcctgttggaacctttattgcgtacccgcgaccgcgtacatcttgcagacggtttctcgccttgcgtggttttgttgaacaacgatttgtccgccggcattcccgacatcctcaaaggcatcagccaaaccgttttgccgccgttgcacggcggttggacgacgcgccgcaaaacaaatcatttcggcgcgtacaaccaagttgccgccgaatttgccaagttaatcggcatcgacgaatggcagattaacccttattttgaaaaaatcggcggtttggacttccaagagcgggaaggtgaagatgcgttggcagaagcggtagaacgtgtgctggcgaaaattcaagccaaatacgacgaatcgggcattaccgacaaacctttcgtcatcgtcaaagccgatgccggcacttacggcatgggcgtgatgagcgtcaaatccgccgacgaagtgcgcggattgaaccgtaaaaaccgcaataaaatggcgaaagtcaaagaaggcttggaagtcagcgaagtgattgtccaagaagggatttatacttatgaaaccttaaacggcgcggtgtgcgaacccgtcgtgtatatgatggaccgcttcgtcatcggcggctttttccgcgtacacgaagggcgcggtgcggacgaaaacctcaacgccggcggtatggtgtttgttccgctgtctaacagcattcctaccggtaacggcgataattcccaagaagcgcccgaagcctgcaagcgcgtattcgaacaatgggactcgctgggtatgccgcgctctgaaaaagactgcgacgtggacaacgaacacaaccgcctctacgtttacggcgtaatggcacgcctgtcgcttctggcggcttcaatcgagttggaagaaacggcgtaa

SEQ ID NO: 69633 - DNA, 2790 bp, Neisseria meningitidis; identical to SEQ ID NO: 60657

SEQ ID NO: 69634 - DNA, 807 bp, Neisseria meningitidis; identical to SEQ ID NO: 50298

SEQ ID NO: 69635 - DNA, 1557 bp, Neisseria meningitidis; identical to SEQ ID NO: 61077

SEQ ID NO: 69636 - DNA, 852 bp, Neisseria meningitidis; identical to SEQ ID NO: 61131

SEQ ID NO: 69637 - DNA, 1599 bp, Neisseria meningitidis; identical to SEQ ID NO: 55629

SEQ ID NO: 69638 - DNA, 876 bp, Neisseria meningitidis; identical to SEQ ID NO: 61876

SEQ ID NO: 69639 - DNA, 759 bp, Neisseria meningitidis; identical to SEQ ID NO: 37775

SEQ ID NO: 69640 - DNA, 816 bp, Neisseria meningitidis; identical to SEQ ID NO: 61191

SEQ ID NO: 69641 - DNA, 219 bp, Neisseria meningitidis; identical to SEQ ID NO: 46127

SEQ ID NO: 69642 - DNA, 426 bp, Neisseria meningitidis
ttgataagaatgaaaacatcgacggtcgtttttggcggattttttatggcagacaacagggagcgaatccaaatccccgttttggaaaatcctggcattagggaaatcaatcactttttttccgtatcaaattttgagaaaaaagccggcgtccttgttttcagaattattcctgaacccaaatttggcaataccgaattaactatctattttgaagaaggatgttatttgccaatgattcaaacaattttagaagatggggatattgaagtcaaaaaccttaaaacagaaaattatagtggaaatacaatggaaatttggggagacttctaccctattgagcatatctctaaaaatatttctacaattcaaaatataatttctgaatttatgatacaaaaacaaacaccggcaccaataatttga

SEQ ID NO: 69643 - DNA, 465 bp, Neisseria meningitidis; identical to SEQ ID NO: 60399

SEQ ID NO: 69644 - DNA, 1908 bp, Neisseria meningitidis
atgccgtctgaagcgtcccgccccgtccgaacagtgttagaatcgaaatccgccacaccgatgcacgacacccgtaccatgatgatcaaaccgaccgccctgctcctgccggctttatttttctttccgcacgcatacgcgcctgccgccgacctttccgaaaacaaggcggcgggtttcgcattgttcaaaaacaaaagccctgacaccgaatcagttaaattaaaacccaaattccccgtccgcatcgacacgcaggacagtgaaatcaaagatatggtcgaagaacacctgccgcttatcacgcagcagcaggaagaggttttggataaggaacagacaggcttcctcgccgaagaagcaccggacaacgttaaaacgatgctccgcagcaaaggctatttcagcagcaaagtcagtctgacggaaaaagacggagcttatacggtgcacatcacaccgggcccgcgcaccaaaatcgccaacgtcggcgtcgccatcctcggcgacatcctttcagacggcaacctcgccgaatactaccgcaacgcgctggaaaactggcagcagccggtaggcagcgatttcgatcaggacagttgggaaaacagcaaaacttccgtcctcggcgcggtaacgcgcaaaggctacccgcttgccaagctcggcaacacccgggcggccgtcaaccccgataccgccaccgtcgatttgaacgtcgtcgtggacagcggccgccccatcgccttcggcgactttgaaatcaccggcacacagcgttaccccgaacaaatcgtctccggcctggcgcgcttccaaccgggcacgccctacgacctcgacctgctgctcgacttccaacaggcactcgaacaaaacgggcattattccggcgcgtccgtacaagccgacttcgaccgtctccaaggcgaccgcgtccccgtcaaagtcagcgtaaccgaggtcaaacgccacaagctcgaaaccggcatccgcctcgattcggaatacggtttgggcggcaaaatcgcctacgactattacaacctcttcaacaaaggctatatcggctcggtcgtctgggatatggacaaatacgaaaccacgcttgccgccggcatcagccagccgcgcaactatcggggcaactactggacaagcaacgtttcctacaaccgttcgaccacccaaaacctcgaaaaacgcgccttctccggcggcatctggtatgtgcgcgaccgcgcgggcatcgatgccaggctgggggcagagtttctcgcagaaggccggaaaattcccggctcggatatcgatttgggcaacagccacgccacgatgctgaccgcctcttggaaacgccagctgctcaacaacgtgctgcatcccgaaaacggccattacctcgacggcaaaatcggtacgactttgggcacattcctgtcctccaccgcgctgatccgcacctctgcccgcgcaggttatttcttcacgcccgaaaacaagaaactcggcacgttcatcatacgcggacaagcgggttacacccttgcccgcgacaatgccgatgtcccctcggggctgatgttccgcagcggtggcgcgtcttccgtgcgcggttacgaactcgacagcatcggacttgccggcccgaacggatcggtcctgcccgaacgcgccctcttggtgggcagcctggaataccaactgccgtttacgcgcaccctttccggcgcggtattccacgatatgggcgatgccgccgccaatttcaaacgtatgaagctgaaacacggttcgggactgggcgtgcgctggttcagcccgcttgcgccgttttccttcgacatcgcctacgggcacagcgataagaaaatccgctggcacatcagcttgggaacacgcttctaa

SEQ ID NO: 69645 - DNA, 900 bp, Neisseria meningitidis; identical to SEQ ID NO: 36345

SEQ ID NO: 69646 - DNA, 462 bp, Neisseria meningitidis
atgaaaccgcaaaaatccctacgcgcccgcgcgatggacatcctctcgcgccaagaagtcagccgcatcggtctgaaacgcaaacttgcaccgcacgccgaaagcgaagaagagttggaaaacgtgttaaacgaatttgccgaacgcaactggcagtcggatttgcgctatgccgaagcctatatccgcagcaaaagccgcaaacacggttcattgaggctgaaacaggctttggcgcaacagggcatagatgaagaaaccagccgcaacctgcttcccgaccgctcaagcgaaaaacagaccgccatagacgtgttgcgtaaaaaattcaaacaccccgccgccgaccttaaagaaaaacaaaaacaggcgcgtttcctcgcctatcgcggattcgatgccgataccgttcagacggcattgaaacacgcttgggacgaaaattgggaagacggctgctga

SEQ ID NO: 69647 - DNA, 276 bp, Neisseria meningitidis; identical to SEQ ID NO: 61521

SEQ ID NO: 69648 - DNA, 1005 bp, Neisseria meningitidis; identical to SEQ ID NO: 54871

SEQ ID NO: 69649 - DNA, 1923 bp, Neisseria meningitidis; identical to SEQ ID NO: 60325

SEQ ID NO: 69650 - DNA, 1059 bp, Neisseria meningitidis
atgattacaccgcaacaggccatcgaacgattaatcagcaataacgagttgttttacgatgaaatgaccgacttgatgcgtcagattatgagcggaaaagtgccgcccgaacaaattgcggcgattttgaccggcttgcgtatcaaggttgaaaccgtttccgagattaccgctgccgccgccgtgatgcgcgagtttgcggcaaaagtgccgctggaggatgcggaagggctggtcgatatcgtcggtacgggcggggatggcgcgaaaaccttcaatatttcgacgacttcgatgtttgttgccgcagcggcaggcgcgaaggttgccaaacacggaggccggtcggtctcttcctccagcggtgcggctgacgtgatggagcaaatgggcgcaaacctcaatctgactcccgaacagattgcccaaagtatcaggcagaccggcatcgggtttatgttcgcccccaatcaccacagtgccatgcgctatgttgccccggtacgacgttcgctcggtttccgaagtattttcaacatattgggtccgttaacgaatcctgcgggcgcgccgaaccagcttttgggcgtgttccacaccgatttgtgcggcatcctttccagagtattgcaacagctcggctccaagcatgttttggttgtttgcggggagggcggtttggatgaaattacactgacgggcaaaacacgcgttgccgagctcaaagacggaaaaatcagcgaatacgacatccgcccagaagatttcggtatcgaaacccgccgcaatttggatgaaatcaaagttgccaatactcaggaatctttgttgaaaatgaatgaggtgctggaaggaagagaaggggctgcgcgcgatatcgtattgctcaacaccgccgccgccctgtatgccggaaatgtcgctgcttcgctttcagacggcatatctgccgcacgggaagccatcgattcaggcagggccaaatcgaaaaaagaggagtttgtcggttttcaaccacaacaaagatgccattttcttggaaagatggagcttgggtga

SEQ ID NO: 69651 - DNA, 456 bp, Neisseria meningitidis; identical to SEQ ID NO: 45576

SEQ ID NO: 69652 - DNA, 1032 bp, Neisseria meningitidis
atgctgcaaaccgacaacctgactgccgctcaaccgcaacgcattgttgccgcccaaaccgcctccgcacaggaagaactgctcgaacgcgccctccgccccaaaacgctggacgactatatcgggcagcataaagccaaagaacagctcgccattttcatccaagccgccaaaaaacgcggcgaagcactcgaccacgttttgctcttcggcccgcccggactgggtaaaaccacactggcgcacatcatcgccaaagaattgggcgtaaatttgcgccaaaccagcggccccgtcctcgaacgcgccggcgatctcgccgcccttttgaccaaccttgatccgcacgacgtattgtttatcgacgaaatccaccgcctcagccctgttgtcgaagaaatcctctaccccgcgcttgaagactaccggctcgacattatgataggcgaagggcccgccgcccgttccgttaaaatcgacctgccgcccttcacgcttgtcggcgcgaccacccgcgccggtatgctgaccaatccgttgcgcgaccgcttcggcatcgtctcccgcctcgagttttacgaaaaccgcgaccttgccaccatcgtcagccgttcggcacaactcctgcaactcgatatgtccgaagaaggcgcggaagaaatcgccaaacgcagccgcggtacgccgcgcatcgccaaccgcctgttgcgccgcgtgcgcgatttcgccgacgtgaaaaacaacggcacaatcgacggcggcatcgccgatgccgctttaagtatgctggacgtggacgtgcaggggctggacgtgatggacaggaaattcctcgaagccgttttgcacaaattcggcggcggcccggtcggtttggacaatgttgccgccgccatcggcgaatcaacagacaccatcgaagacgttatcgaaccctaccttatccaacaaggcttcctgcaacgcaccccgcgcggcaggatggcgaccgaacgcgcctacctgcatttcgggctgcccgtcgaaaaataa

SEQ ID NO: 69653 - DNA, 591 bp, Neisseria meningitidis; identical to SEQ ID NO: 36437

SEQ ID NO: 69654 - DNA, 987 bp, Neisseria meningitidis
atgaaacggtacgtttgcctccggcatcaggtcggggattgtcccgtaaagtggcaaaagcgtttttttgccactaaaatctacaccctatacttttcggacaggggcgcggaaatggaaatatggaatatgttggacacttggctcggtgccgtcccgatacgtgcggaggcggtcgaatccgtggcggtggtcgcggctttgctgctggcgcgcgcccttctgttgaatatccacttcaaacggcatccggatttcggcatcgaaagcaagcggcggtttttggttgccagccgcaatataacgctgcttttggtgctgttttcgctggcatttatctggtcggcgcaaatccaaacgctggctttgtcgatgtttgcggtggcggcggcggtcgtcgtggcgacgaaggaactgattatgtgtctgtcgggcagtattttaaggtctgccacccagcaatactcggtcggcgactatatcgaaatcaacggcctgcgcgggcgcgtggtcgacatcaacctgttgaacacgctgatgatgcaggtcggtccgaaccccttggtcggacagcttgcgggaaccaccgtttctttccccaacagcctgttgttgagccaccccgtgcgccgcgacaatattttgggcgactatgtcatccatacggtcgaaatccccgttcccatccatttggattcggatgaagccgtatgccgtctgaaagccgtactcgagcccttgtgcgcgccctacatccccgccatccaacggcatttggaaaacgtgcaggcggaaaaactgtttatcacgcccgccgccagaccgcgcgttacccgcgtgccgtacgatgacaaggcataccgcatcatcgtccgcttcgcctcccccgtttcaaagcggctggaaatccaacaggcggttatggacgaatttttgcgcgtacaataccgcctgttaaattaccccgccggctccgaaacactttaa

SEQ ID NO: 69655 - DNA, 564 bp, Neisseria meningitidis; identical to SEQ ID NO: 45112

SEQ ID NO: 69656 - DNA, 1245 bp, Neisseria meningitidis; identical to SEQ ID NO: 43384

SEQ ID NO: 69657 - DNA, 255 bp, Neisseria meningitidis; identical to SEQ ID NO: 39349

SEQ ID NO: 69658 - DNA, 1170 bp, Neisseria meningitidis; identical to SEQ ID NO: 61268

SEQ ID NO: 69659 - DNA, 219 bp, Neisseria meningitidis; identical to SEQ ID NO: 40879

SEQ ID NO: 69660 - DNA, 741 bp, Neisseria meningitidis; identical to SEQ ID NO: 54417

SEQ ID NO: 69661 - DNA, 840 bp, Neisseria meningitidis; identical to SEQ ID NO: 55224

SEQ ID NO: 69662 - DNA, 774 bp, Neisseria meningitidis
atgagaccatatgctactactatttatcaactttttattttgtttattgggagtgtttttactatgacctcatgtgaacctgttaatgaacaaaccagtttcaacaatcccgagccaatgacaggatttgaacatacggttacatttgattttcagggcaccaaaatggttatcccctatggctatcttgcacggtatacgcaagacaatgccacaaaatggctttccgacacgcccgggcaggatgcttactccattaatttgatagagattagcgtctattacaaaaaaaccgaccaaggttgggttcttgagccatacaaccagcaaaacaaagcacactttatccaatttctacgcgacggtttggatagcgtggacgatattgttatccgaaaagatgcgtgtagtttaagcacgactatgggagaaagattgcttacttacggggttaaaaaaatgccatctgcctatcctgaatacgaggcttatgaagataaaagacatattcctgaaaatccatattttcatgaattttactatattaaaaaaggagaaaatccggcgattattactcatcggaataatcgaataaaccaaactgaagaagataattacagcactggcgtaggttcctgtattaacggtttcccggtacggtattacccgtttattcgggaaaagcagcagctcacacagcaggagttggtaggttatcaccaacaagtagagcaattggtacagagttttgtaaacaattcaagtaaaaaataa

SEQ ID NO: 69663 - DNA, 123 bp, Neisseria meningitidis; identical to SEQ ID NO: 50914

SEQ ID NO: 69664 - DNA, 459 bp, Neisseria meningitidis
atgcccatcatctcaaccctaaacatcctctcacccaagctctatcccagtgagccatataacgaaagcgaagcactcggtgccatcacttggctatggtatcagtcgcctacgcatcgccaagtacctattgtggagatgatgacgtatatattgcctgtgttaaaaaacgggcagttcgctttgttttgcaagggtacccaaccaatcggttatatctcatgggcttattttgatgaagtggcgcaggcgcattatttagaatctgaccgccatttgcgcgacaacagcgattggaactgtggcgacaatatttggctgattcaatggtttgcgccattgggacacagtcatcaaatgcgctcagctgtgcgccagttatttcctagtacgacagtacgcgccttgtatcataaagggagcgataagggtttgagaattttaacttttaaaacttga

SEQ ID NO: 69665 - DNA, 1047 bp, Neisseria meningitidis
atgaaaatgcaggcagttgttgtgaataaaaatgtagcgggcgatgtggaaatagtcgaacgcgaggttcgcccgttggaatacggcgaggcgttggtcgaagtcgaatattgcggcgtgtgccacaccgacctgcacgttgcggcaggcgactacggcgaaaaaccgggccgcgtgctgggacacgagggcatcggtttggttaaagaagttgccgacggtgtgaaaaatctgaaagtcggcgaccgcgtcagcatcgcctggctgttccaaagctgcggttcttgcgaatactgcaataccggccgcgaaaccttgtgccgctctgtattgaacgcaggttatactgccgacggcggtatggcgacctactgcatcgtgagtgccgattacgcggtcaaagtccctgaaggtttggatcctgcgcaagcttcgagcattacttgtgccggcgtgaccacttataaagccattaaagtttccagtgttcgtccgggacagtggattgccatctacggcgcgggcggtttgggcaacttgggggtccaatacgcgaaaaaagtattcggcgcgcacgttgtcgccatcgacatcaacgacgacaaactggcgtttgccaaagaaaccggcgcggatttggttgtcaacgccgccaaagaggacgctgccaaagtgattcaggaaaaaacaggcggcgcacacgctgcggtcgtaaccgccgtatctgctgccgcattcaactctgccgtgaattgcgtccgcgcgggcggacgtgtggttgccatcggactgccgccggaatcgatggatttgtccatcccgcgtttggttttggacggcatcgaagtggtcggctctttggtcggcacgcgcaaagatttggaagaagccttccaattcggcgcggaaggtttggttgtgccgaaagtccaactgcgtgctttggatgaagcacccgccattttccaagaaatgcgcgaaggcaaaatcaccggtcgtatggtaatcgatatgaaaaaagaatgcggctgcggccaccaccactga

SEQ ID NO: 69666 - DNA, 504 bp, Neisseria meningitidis; identical to SEQ ID NO: 61647

SEQ ID NO: 69667 - DNA, 1398 bp, Neisseria meningitidis
atgagccaaggcaaaatcgtacaaattatcggtgcggttgttgacgtggaatttccacgcgacatgattccgcgcgtttacgacgctttgaaattagacgaaaacggtctgactttggaagtccaacagcttttgggcgacggcgtagtccgtgccattgcgatgggcagctcggacggtttgaaacgcggcatgactgtgagcaataccggtgcgcccattactgtgccggtaggtaaaggtacgttgggacgcattgtcgatgtattgggaacgcctgttgacgaagcaggtccgatcgataccgacaagagccgtgccatccaccaagctgcccctaagtttgacgaactgtcttccacaaccgaattgctcgaaacgggcattaaagtgattgacttgctgtgtccgtttgccaaaggcggtaaagtaggtctgttcggcggtgccggtgtgggtaaaaccgtgaacatgatggaattgatcaacaacatcgccaaagcgcacagcggcttgtccgtgttcgcaggcgtgggtgagcgtacccgcgaaggtaacgacttctaccacgagatgaaagattccaacgtattggataaagtggcaatggtttacggtcagatgaacgaacctccgggcaaccgtttgcgcgtcgcattgaccggtttgaccatggcggaatacttccgtgacgaaaaagacgaaaacggcaaaggccgcgacgtattgttcttcgtggacaacatctaccgttacaccctggctggtaccgaagtatccgcattgttgggtcgtatgccgtctgcagtgggctaccaaccgacattggcagaagaaatgggtcgtttgcaggagcgtattacctctacccaaaccggttctattacttccatccaagccgtatatgtacctgcggacgacttgaccgacccgtctccggcaacaacgttcgcccacttggacgcaaccgtcgtattgagccgcgatattgcctctttgggtatttacccggcagtcgatccgcttgattctacttcgcgccaactggatccgatggtattgggtcaagagcactacgacgtagcgcgcggcgtacagtccaccctgcagaaatacaaagaattgcgcgacatcatcgccatcttgggtatggacgaattgtctgacgaagacaaactgaccgtaatgcgtgcgcgtaaaatccaacgcttcctgtcccaaccgttccacgttgccgaagtgtttacaggttctccgggcaaatatgtcgccctgcgcgataccattgccggcttcaaagccatcttgaacggcgaatacgaccatctgcccgagcaggcattctatatggtcggcagcatcgaagaagcggttgagaaagcgaaaaccttaaactga

SEQ ID NO: 69668 - DNA, 348 bp, Neisseria meningitidis; identical to SEQ ID NO: 54695

SEQ ID NO: 69669 - DNA, 1281 bp, Neisseria meningitidis
ttgaaggattgttttcctcaaggtctgaatggaaaaaaaacagcagtggcattaagcggcggcttggattccgtcgttttgctgcatctgcttgtccgcgccggaaaaaagggcggttttattccggatgcattgcatatccatcacggcttgagtccccgtgccgacgattgggcagatttctgccaaaactattgcgatatgctcggggtggggctggaaacggttaaggtctgcgtggaaaaaaacggtttgggcatcgaggcggcggcgcggcaaaagcgttatgccgcgtttgccgaaaaaggctttgacgttttggcgttggcgcaccacagggacgatcaaatcgaaacctttatgctggcagtcgctcgcggcggcggtttgcgcgctttggcggctatgcccaccgtccgcccttttggggaaaaaggcatcatctggcggcctttgctgcctttttcgcgccaagacatatgggattatgcccaaaaacacggtttgccgaatatcgaggacgaaagcaatagcgatacggcttatttgcgaaaccgcttccggcaccgtattttgcccgaactttcggcgcagattccccatttcgggcggcatgtactgaacaatgtccgcgctttgcaggaagatttggctttgttggacgaaatcatcggtcaggactgccgttgggtctgtgaggaaggcagtttcgatacggtgcgttggcaggcgttttccccacgccggaaaacccatattttgcggtattttttgaaggaaaacggcatccccatgccgaatcagaatgcccttgccgacattgcccgggttttgacggaggcaaaaaccggacgttggaacttgcaaggctttgaattgcatcattatgcaggcaggctgtttgtgttccgactggaaaaaacggataaactgcggtttttgaaagacaggcagataagcggaaatttaagggaaatattgacggggcagggatttgttttaaaacgtcatccgtttgggcttcctgagcatcttttggagcaggacggaattttgaggacggtagcggtatcggatacgttggctgtcggcggcatccataaggatgtgaaaaaaatccttcaggggaaacgggttttgcctgtcctgcgcccaatttggccgcttgttgccgacagcggaaaccgtccattggcgttggcaaactgttgtgcggattttcaaatctcggtttcagacggcattttgcccgtccatcctgactttcccattttattttga

SEQ ID NO: 69670 - DNA, 408 bp, Neisseria meningitidis; identical to SEQ ID NO: 55051

SEQ ID NO: 69671 - DNA, 1035 bp, Neisseria meningitidis; identical to SEQ ID NO: 54294

SEQ ID NO: 69672 - DNA, 1035 bp, Neisseria meningitidis
atgagtacttcattgagttaccgcgatgcaggtgtcgatatcgacgcaggcgaccaactggtcgaaaacatcaaaccgtttgccaaacgcaccatgcgtccagaagtattgggggatttgggcggttttggcgcattggtcgaaatcggcaagaaatataaaaatcccgtattggtcagcggtacggacggtgtgggtaccaagctcaagcttgcctttgattgggataaacacgatatggtgggcatcgaccttgttgcaatgagtgtcaacgatattttggttcaaggagcagaacctctgtttttcttggattatttcgcctgcggcaaattggatgttccgcgcgcaaccgatgtcatcaaaggcattgcacaaggttgcgaagaatccggctgcgccctgattggcggggaaactgccgaaatgccgggcatgtatcccgtcggagaatacgatttggcgggttttgccgtcggcgtagtggaaaaagagaatgtcattaccggccgcagtatcggcgcgggcgatgtggtattgggtttggcttccaacggcgcacattcaaacggctattcccttatccgtaaaatcatcgaacgcgacaatcccgatttggatgccgagtttgataatggcaaaaccttgcgggaggctgttattgcgccgacccgtctgtatgtgaaaccgattcttgccgctttggaaaaatttaccattaaaggtatggcacacattaccggcggcggcattaccgaaaacgtgccgcgcgtgttgcctgaaaacacggttgcacaaatcgatgctaaatcgtgggaattgcccaagctcttccaatggcttcaaaaggcgggcaatgtggaaacccaagaaatgtaccgaacctttaactgcggcatcggcatggtcgttattgttgctgccgaagatgccgatgcggttcagggtctcttgggtgaacaaggtgaaacagtttaccgtttaggtttgatccgtgagcgtcagggagacgagcatcaaacccaggttgcctga

SEQ ID NO: 69673 - DNA, 720 bp, Neisseria meningitidis; identical to SEQ ID NO: 55005

SEQ ID NO: 69674 - DNA, 324 bp, Neisseria meningitidis; identical to SEQ ID NO: 37053

SEQ ID NO: 69675 - DNA, 258 bp, Neisseria meningitidis; identical to SEQ ID NO: 55093

SEQ ID NO: 69676 - DNA, 549 bp, Neisseria meningitidis; identical to SEQ ID NO: 39055

SEQ ID NO: 69677 - DNA, 813 bp, Neisseria meningitidis
atggaaaatatcggcaggcagcgacccatcggcgtttttgactcgggaatcggcggtttgaccaatgtgcgtgcgctgatggaacggctgccgatggaaaacatcatttatttcggcgacacggcgcgcgtgccttacgggacgaaatctaaggcgaccatcgaaaatttctcgatgcagattgtcgattttttattggaacacgatgttaaggcgatggttatcgcgtgcaatacgattgcggcggtggcggggcagaaaatccgccaaaagacgggcaatatgccggttttggacgtgatttccgccggcgcgaaagccgcgctggcaacgacgcgcaacaataaaatcggcattatcgccaccaatacgacagtcaacagcaacgcctatgcgcgcgccatccacaggaacaaccccgatacgctcgtccgcacgcaggccgcgccgctgcttgtccctttggtggaagagggctggttggaacacgaagttacccgcctgaccgtatgcgaatacctcaaaccattgcttgcagacggcatcgatacgctggtgttgggctgcacgcactttcccttgctcaagcccttaatcggcagggaggcgcacaatgtcgcgttggtcgattccgcgattacgacggctgaagaaaccgcacgcgtccttgcgcaggagggattactcaataccgacgacaataatcccgactatcgtttttatgtcagtgatattcctttgaaattcagaaccatcggcgagcgttttctgggcaggacgatggagcagattgaaatggtgtctttgggttaa

SEQ ID NO: 69678 - DNA, 1809 bp, Neisseria meningitidis
atgcgtaccaactattgcggtctgattagcgagcaatacttagaccaaaccgttaccgtcaaaggctgggtacaccgtcgacgcgaccatggcggtgtgatttttatcgacctgcgcgaccgcgaaggcatcgtccaagtcgtgatcgatcccgacacgcccgaagcgtttgccgctgccgattcctcccgcaacgaatacgttttgagcattaccggccgcgtacgcaaccgtcccgaaggcacgaccaacgacaaaatgatttccggcaaaatcgaaatccttgccaaagaaatcgaagtgttgaacgctgccgctacgcctccgttccaaatcgacgacgaaaacatcagcgaaaacgttcgcctgaccaaccgcgttatcgacctgcgccgtccggtgatgcagcgcaacctgcgcctgcgttaccaagtcgctatgggcgttcgccgctacttggacgcgcaaggtttcatcgacattgaaaccccgatgctgacccgctccacgcccgaaggcgcgcgcgactacctcgtgccgagccgcgttcatccgggcgagttcttcgcgctgccgcaatcgccgcaattgttcaaacaactgttgatggtggcgggtttcgaccgttactaccaaatcaccaagtgcttccgcgacgaagacttgcgtgccgaccgtcagcctgaattcacgcaaatcgacttggaaacctcgttcttaaacgaggatgaaatcatggacatcaccgaaggtatggcgaaacaagtcttcaaagacgcgctgggcgtggacttgggcgacttcccacgcatgccttactctgaagccatgttctactacggctctgacaaaccggacatgcgtatcaacttgaaattcaccgagttgaccgacctgatgaaaacggaagaattcaaagtcttccgtggcgcagccgacatgaaaggcggccgcgtggttgccctgcgtgtgccgaacggtacgaaattcagccgcaaagaaatcgacgaatacactaaatttgtcggcatctacggtgcgaaaggtctggcatacatcaaagtaaatgatgtgggcaacctctccaacggcgaagacagcggcctgcaatctccaatcgtaaaattcctgtctgagaatgccctgaaggaaatcatcgcgcgtaccggcgcacaaaacggcgatattatcttcttcggtgcagacaaaaccaaagttgtgaacgaagccatcggcgcattgcgtatcaaagtcggcttggaacacggcaaagataacggctacttcacagacgaatggaaacctttgtgggttgtcgatttcccaatgttcgaatacgacgaagaagccgaccgctacgttgccgtacaccatccgtttaccgcgcctaaagaaggtcatgaagacctgatggtttccgaccctgcaaactgcctggcccgtgcctacgacatggtattgaacggctgggaaatcggcggcggctctatccgtatccaccgtgcagacgtacaagagaaagtgtttgccgcgctgaaaatcagccctgaagagcaacaagagaaattcggcttcctcttggacaacctgaaattcggtgcgcctcctcacggcggccttgcattcggcctcgaccgtttggttaccctgatgaccggcgccgaatctatccgcgacgtgattgccttcccgaaaacacaacgcgcccaatgcctgctgaccaacgcgcccaacagcgtggacgacaagcagttgcgcgaattgagtttgcgcctgcgtcaaaaggcggctgaaaccaaagaagcataa

SEQ ID NO: 69679 - DNA, 645 bp, Neisseria meningitidis
gtgcttgcctccgccatcgacttcatcctccatatcgaccaacacctgctcgcgctgtcggcgcaatacggtgtgtggatttatgcgattctgtttttgattgttttttgcgaaaccggcctgattgttacgcccttactgcccggcgattcgctgctgtttgcggccggcggtattgccgcgctgggcggtatggatattcatttgatggttgcattattaagccttgccgccatactcggcgacgcgctcaattttaccgtcggcaaatatttcggcggcaggctgttcgccaatcccgattctaaaatcttccgacgcgaatatctcgataaaacccaccgtttttacgaaaaacacggcggcaaaacgattatcatcgcgcgcttcgtgcccatcgtccgcaccttcgccccctttgtcgccggtatggggaaaatgcactatgccaaatttatccgctacaacatcatcggtggcttgttgtgggttatcctgttttcttacgcgggctatttctttgccaacttccccgtcgtaaaaaacaatctgggcttggtgatgggcggcatcattattgtttccgtcctgccgggtgcggttgaaattgcccgcgccaaacttgcggtaaaatccaaacggtaa

SEQ ID NO: 69680 - DNA, 135 bp, Neisseria meningitidis; identical to SEQ ID NO: 44583

SEQ ID NO: 69681 - DNA, 681 bp, Neisseria meningitidis; identical to SEQ ID NO: 55189

SEQ ID NO: 69682 - DNA, 318 bp, Neisseria meningitidis; identical to SEQ ID NO: 65370

SEQ ID NO: 69683 - DNA, 447 bp, Neisseria meningitidis
atggcgcatttcatgggtttggcattggaacaggcgaaactgtccgcattaatgggcgaaatacccgtcggggcagtcatcgtttcagacggcaaaatcatcgcatcggcacacaacacctgcattgccgactgcaatgtcagccggcacgccgaaatcaacgccttggcacaggcaggcagcgaaatgcaaaactaccgccttgacggatgcgacatctacatcaccctcgaaccctgcgccatgtgcgcgtccgcactgatacaggcacgaatcaggcgcgtgatctacggtgcggcagaacccaaaaccggcgcggcaggaagcatcgtcaacctgtttgccgacaaacgcctcaatacgcacaccgccatacggggcggaatcctgcaagaagaatgccgcgccgtattaagccgttttttccaaaacaaaagaaaaggttga

SEQ ID NO: 69684 - DNA, 672 bp, Neisseria meningitidis; identical to SEQ ID NO: 54612

SEQ ID NO: 69685 - DNA, 1671 bp, Neisseria meningitidis
gtgcgtgctgaagacaccccctacgcttgctatttgaaacagctccaagtcaccaaagacgtcaactggaaccaggtacaactggcgtacgacaaatgggactataaacaggaaggcttaaccggagccggagcagcgattattgcgctggctgttaccgtggttactgcgggcgcgggagccggagccgcactgggcttaaacggcgcggccgcagcggcaaccgatgccgcattcgcctcgctggccagccaggcttccgtatcgctcatcaacaacaaaggcaatatcggtaacaccctgaaagagctgggcagaagcagcacggtgaaaaatctgatggttgccgtcgctaccgcaggcgtagccgacaaaatcggtgcttcggcactgaacaatgtcagcgataagcagtggatcaacaacctgaccgtcaacctggccaatgcgggcagtgccgcactgattaataccgctgtcaacggcggcagcctgaaagacaatctggaagcgaatatccttgcggctttggtgaatactgcgcatggagaagcagccagtaaaatcaaacagttggatcagcactacattacccacaagattgcccatgccatagcgggctgtgcggcagcggcggcgaataagggcaagtgtcaagatggcgcgataggcgctgcagtcggtgagattgttggtgaggctttggttaagaatactgatttcagtcgtatgagtgcgaccgaaatcgaaaaagctaaagcgaagattactgcctattcaaaactggttgccggcactgcgtctgccgttgtaggcggggatgtgaatacagcggcgaatgcggctactgtggcggtggagaataatactttgtatcctagatgcgttggtgcaaagtgtgatgaatttcaaaaggaacaacaaaaatggatacgtgaaaatcctgaagaatatcgagaagttttgcttcttcagacaggatttattccaattatcggtgatatacagagttttgtacaagcacagaccgctgccgatcacctgtttgctttgctgggtgtggttccgggtatcggtgaatcgatacaggcctataaagtagcgaaagcggcaaaaaatttacaaggcatgaaaaaagccttggacaaggcagcaaccgttgccactgcacagggctatgtcagtaaaaccaaaatcaaaatcggtcaaactgaattaagggttactgcagcaactgacaaacaattgctgaaagctattggcgaaggaagggacacgacaggtaaaatgaccgagcagttatttgactctttagctaaacaaaatggcttcagagtgctttcgggcggcaaatacggcggaaataacggttttgatcatgtatggcaggctgccgatggtagtgttgttttgattgtagaaagtaagcagattaggaacggtacggtacagctgaatccgaatggtgcgggtggatatacgcagatgagtcgtgaatggattaaacaagttgtaaaaagtttacctgatggtagtcctgctaaggcagttgtcttaaaagcaaatcagaacggcaaattaaaaacggcaatagcaggcgttgatcgtcaaacaggtaaggccgttattctttctgtcaaagttccttctaaaaccaatataaggagataa

SEQ ID NO: 69686 - DNA, 1371 bp, Neisseria meningitidis; identical to SEQ ID NO: 56096

SEQ ID NO: 69687 - DNA, 2427 bp, Neisseria meningitidis
atgtcggcacaaaccgatccgggctactttttcatgcccaaccacattattctgataggcgcgagcgaacgtccgtacagcctgggcgaacgcgtactcagcaacctgctgagtacgccctttcaaggaaaaatcacccccgtaaacccgcgccaccacaccatagccgggcttcccgcctacaccagcctcaacaaaatccccggcaatgcagacctgattattgccgttaccctacccgacagttacgacaccctcttcaaaacctgccgcaaaaagcagctccgacacatcatcctcatacaggactgggacagcctgtctgccgcagaactgcacaccgccgaaactgccatccgcaaacaccacggcaacggactcaacatcaccgcctgcaccaccgcaggcatccaactgccctcactcggacttaacatcagtacccaagacggatacgccgcaggccataccgccatactgaccggcaatgccgccgtcagccgccaaatcgacaacatcctgaacaaactccgtcaaggcacatcccgccacatcagcctgcatcccggcatcagccccatcacatccgccgattggctcaaccgcttcggacacagcctgcacaccaaaaccgccgtcctacaccacaaccctgaagaagaccagcgcaaactgttcagcgcaatccgccaatttacccgccatacgccgctgattctccacatcacctgccgcacgacagaaaccgaccgtgccgtactgcactgcctcgcccgacactgcaacttcctcatcagtttcaacgccgacgacctcgaagccgcactgcgcgcccaactgtccgaccttccacccctgtcccgactcgacatcctgtccgacacgcctgccgaatggctgaacgcgcacgcgccaaaaaccctcgccctccactttcccaaccttccccaccacatccgcaacggacacctgaccggcacacccacaccctcaatctgccacgacatcgcctcacgtcagcttgcccgccccgacacccaagccgtcctgaccatcctcagtccctccggacacgaggattacaaaaaaacagcacgcgcccttatccgcctgtccgaacagaccgccaaacccctgctcgtcagcagccccttttcagacggcataacccatttcgacacccccactcaggcaatccgcaccctttcctaccgcaacaccgccgccgccctgaaacaggcacagctcgacattgcaccgccgcagccatgccgtctgaaaacaccgcaaccccaaaacatcaaaaaagcccttgcagcggcaaatccctccctgctcgccgaagccctgcacctccccccctaccggcacactacccataacgccgtccaattccaattcggcagccaccccatttacggcaatattctgaccgtacggtacgcagggcaaaccacggccgcccttcccccgtttaccacacaggacagcctccatatcgcccagtttgccgaattggaagacccgcaaacccttaaccagttccttcacatactgaccaccctttccgaccacaacctgcacatcggcaaaatcaccctcaacctaaacggcggacaatacagcagcgatttcatcttaaagacacccgaaacacacgacacgcccaaacgcaagaacacaggcaaagccgcccaaaccctcgaacatgccgccgcaaaaatgcagagtgccgccgcatacctgaaacacaaaaacccgacagccgccgaatttctccgccacacaagcgaagccgccgcagaactgctcggcagcaaaaccgaaaccggagcagccgtacccaacgtacttgccccctatcccgcagcacacctcaaaacactgtccctaaaaaacaacacgaccgttaccattaccccccttttgcccgaagacgcagaagccaaacagcagttcgtccgcagcctcagccccgaagcacggtacacacgcttcatgacccacaccaacgaactgcccgcagccacgttggcacgcctgtgcaaccccgactaccactgtgaagccgcatggacggcaagggatgccgacagcaacatcgtcgccgtcgtccgccacagccgcctgaaccgcaacgaatgcgaattcggcatcacactggcggaacatatgcgcggcagcggactggcacagaaaatgatggaactcatcatccaaaccgccgcacagcaaggctaccggactatgagtgccgacattctcaaaaccaatactcccatgatcaaacttgctgaaaaatcaggatttaccctcaaggaatcggacaccgaaaaaaacctgtaccgcgcatatctgaaccttgcggcagacaaaacaacagaaaaaacaaataaaaacttgcacaccgaccacaaaataacctaa

SEQ ID NO: 69688 - DNA, 727 bp, Neisseria meningitidis
atggcatttgcctcactatttaccctgccggacgacatcaccgccgttttggacgatgttgccctgatgaccaaagccgccgcaaagaaaaccgccggcatggtcggcgacgatttggcacccaatgccaaccgggttacgggcgtatcggcagaacgcgagttgccgattgtttggtcgatggcgaaaggttctttttccaacaagccggttttggtgcctgcggccctgctgctttccgccttcctgccgcaactcattacgccgcttttgacggcaggcggcatttatctgtgctttgaaggcgtagaaaagctgctgcacaagtttctgcaccgacatgacgcgcatgctcgtaatggcggcaatcggcatcggcatgactgttttggtgtacggaatcgttgccgtcatcgtcaaactcgacgacttaggcatgctgctgatgcgccgcccacaaaccttttcgcgcagtttggggcaaatgctgactgcctttatgccttgctttatgcgcggtttgagcgtggtcggcacgcttgccatgtttcttatcggcggcgtactggtcgcccacaacctcggccttctgcacgatttcctgcacgcgcaacactgggacgctggctgggcggagtacttcgccaacctcgttgtcgggctgctttccggttcgattgcctgcgcccccgccttgccgctgatgaatcgtttcggcaggcattga

SEQ ID NO: 69689 - DNA, 969 bp, Neisseria meningitidis; identical to SEQ ID NO: 39511

SEQ ID NO: 69690 - DNA, 423 bp, Neisseria meningitidis; identical to SEQ ID NO: 38356

SEQ ID NO: 69691 - DNA, 1092 bp, Neisseria meningitidis; identical to SEQ ID NO: 61155

SEQ ID NO: 69692 - DNA, 1452 bp, Neisseria meningitidis; identical to SEQ ID NO: 55568

SEQ ID NO: 69693 - DNA, 474 bp, Neisseria meningitidis; identical to SEQ ID NO: 54328

SEQ ID NO: 69694 - DNA, 285 bp, Neisseria meningitidis; identical to SEQ ID NO: 47739

SEQ ID NO: 69695 - DNA, 609 bp, Neisseria meningitidis; identical to SEQ ID NO: 39049

SEQ ID NO: 69696 - DNA, 816 bp, Neisseria meningitidis; identical to SEQ ID NO: 44574

SEQ ID NO: 69697 - DNA, 897 bp, Neisseria meningitidis
atgtttcgtttacaattcgggctgtttccccctttgcgaaccgccatgcacatcctgttgaccgccctgctcaaatgcctctccctgctgccactttcctgtctgcacacgctgggaaaccggctcggacatctggcgttttaccttttaaaggaagaccgcgcgcgcatcgtcgccaatatgcgtcaggcaggcatgaatcccgaccccaaaacagtcaaagccgtttttgcggaaacggcaaaaggcggtttggaacttgcccccgcgtttttcagaaaaccggaagacatagaaacaatgttcaaagcggtacacggctgggaacatgtgcagcaggctttggacaaacacgaagggctgctattcatcacgccgcacatcggcagctacgatttgggcggacgctacatcagccagcagcttccgttcccgctgaccgccatgtacaaaccgccgaaaatcaaagcgatagacaaaatcatgcaggcgggcagggttcgcggcaaaggaaaaaccgcgcctaccagcatacaaggggtcaaacaaatcatcaaagccctgcgttcgggcgaagcaaccatcgtcctgcccgaccacgtcccctcccctcaagaaggcggggaaggcgtatgggtggatttcttcggcaaacctgcctataccatgacgctggcggcaaaattggcacacgtcaaaggcgtgaaaaccctgtttttctgctgcgaacgcctgcctggcggacaaggtttcgatttgcacatccgccccgtccaaggggaattgaacggcgacaaagcccatgatgccgccgtgttcaaccgcaatgccgaatattggatacgccgttttccgacgcagtatctgtttatgtacaaccgctacaaaatgccgtaa

SEQ ID NO: 69698 - DNA, 432 bp, Neisseria meningitidis; identical to SEQ ID NO: 40005

SEQ ID NO: 69699 - DNA, 582 bp, Neisseria meningitidis; identical to SEQ ID NO: 61502

SEQ ID NO: 69700 - DNA, 126 bp, Neisseria meningitidis; identical to SEQ ID NO: 38379

SEQ ID NO: 69701 - DNA, 738 bp, Neisseria meningitidis; identical to SEQ ID NO: 54918

SEQ ID NO: 69702 - DNA, 381 bp, Neisseria meningitidis; identical to SEQ ID NO: 42684

SEQ ID NO: 69703 - DNA, 807 bp, Neisseria meningitidis; identical to SEQ ID NO: 45050

SEQ ID NO: 69704 - DNA, 843 bp, Neisseria meningitidis; identical to SEQ ID NO: 60475

SEQ ID NO: 69705 - DNA, 384 bp, Neisseria meningitidis; identical to SEQ ID NO: 54615

SEQ ID NO: 69706 - DNA, 933 bp, Neisseria meningitidis; identical to SEQ ID NO: 55401

SEQ ID NO: 69707 - DNA, 516 bp, Neisseria meningitidis; identical to SEQ ID NO: 54969

SEQ ID NO: 69708 - DNA, 783 bp, Neisseria meningitidis; identical to SEQ ID NO: 40664

SEQ ID NO: 69709 - DNA, 423 bp, Neisseria meningitidis; identical to SEQ ID NO: 36768

SEQ ID NO: 69710 - DNA, 588 bp, Neisseria meningitidis; identical to SEQ ID NO: 61717

SEQ ID NO: 69711 - DNA, 1197 bp, Neisseria meningitidis
atgccgtctgaaccgttcggacggcataacgcaacaaacactttaatatccatcacacaggatgacacgatgacccttatcaaacccgtcattgccgcgctcgcactcatcgggcttgccgcctgctccggcagcaaaaccgaacagcccaagctcgactaccaaagccggtcgcaccgcctgatcaaacttgaagtcccacccgatttgaacaaccccgaccaaggcagcctctaccgcctgcctgccggttcgggagccgtccgcgccagcgatttggaaaaacgccgcacacccgccgtccaacagcctgccgatgccgaagtattgaaaagcgtcaaaggtgtccgcctcgagcgcgacggcagccaacgttggcttgtcgttgacggcaaatcccctgccgaaatctggccgcttctgaaagccttttggcaggaaaacggcttcgacatcaaatccgaagaacccgccatcggacaaatggaaaccgagtgggcggaaaaccgtgccaaaatcccccaagacagcttgcgccgcctattcgacacagtcggtttgggcggcatctactccaccggcgagcgcgacaaattcatcgtccgtatcgaacagggcaaaaacggcgtttccgacatcttcttcgcccacaaagccatgaaagaagtgtacggcggcaaagacaaagacacgaccgtatggcagccctccccgtccgatcccaacctcgaagccgctttcctgacgcgctttatgcaatatttgggcgttgacggacagcaggcggaaaacgcatcggcaaaaaacccgaccctgcccgccgccaacgaaatggcgcgtatcgaaggcaaaagcctgattgtctttggcgactacggcagaaactggcggcgcaccgcgctcgccctcgaccgcatcgggctgaccgtcgtcggtcaaaacaccgaacgccacgctttcctggttcaaaaagccccgaacgaaagcaatgcagttaccgaacaaaaacccggcctgttcaaacgcctgctgggcaaaggcaaagcggagaaacctgccgaacagccggaactgattgtctatgccgagcctgtcgccaacggctcgcgcatcgtcctgctcaacaaagacggcagcgcatatgccggcaaagacgcatccgcattattgggcaaactccattccgaactgcgttaa

SEQ ID NO: 69712 - DNA, 627 bp, Neisseria meningitidis; identical to SEQ ID NO: 60418

SEQ ID NO: 69713 - DNA, 360 bp, Neisseria meningitidis; identical to SEQ ID NO: 52616

SEQ ID NO: 69714 - DNA, 489 bp, Neisseria meningitidis; identical to SEQ ID NO: 54926

SEQ ID NO: 69715 - DNA, 657 bp, Neisseria meningitidis; identical to SEQ ID NO: 64937

SEQ ID NO: 69716 - DNA, 177 bp, Neisseria meningitidis; identical to SEQ ID NO: 38352

SEQ ID NO: 69717 - DNA, 387 bp, Neisseria meningitidis; identical to SEQ ID NO: 54563

SEQ ID NO: 69718 - DNA, 2082 bp, Neisseria meningitidis; identical to SEQ ID NO: 60388

SEQ ID NO: 69719 - DNA, 819 bp, Neisseria meningitidis
atgaaaaaaacagtttttacatgtgccatgattgccctgaccggtactgccgccgctgcacaagagcttcaaaccgctaatgagtttaccgtccacaccgacctctcttccatttcttcaactcgtgctttcctgaaagaaaaacacaaagctgccaaacacatcggcgtacgtgctgatattccttttgatgccaaccaaggcatccgcttggaagccggtttcgggcgcagcaaaaaaaatattattaatttggaaacagatgagaacaagctgggtaagactaaaaatgtaaaactgcccaccggcgttcctgaaaaccgtatcgatctttacacaggctacacctacacccaaacgttaagtgattctttaaatttccgtgtgggtgccggcttgggttttgaatcttcaaaagacagcattaaaaccaccaagcatacgcttcacagcagccgtcagtcgtggtcagccaaagttcacgcggatttgctttcccaactgggtaacggctggtatatcaacccttggtctgaagtgaaatttgacctcaagtcccgctataaattaaacaccggcgttaccagtctcaaaaaagacatcaatcaaaaaaccaacggctggggctttggattgggtgcaaatattggtaaaaaactgggcgaatccgccagcatcgaggcggggccgttctacaaacaacgtacttacaaagaatccggcgagtttagtgtaccaaccaagagtggcgacgtatcgctcaccatcccgaaaaccagtattcgtgaatacggcttgcgcgtcggcataaaattctga

SEQ ID NO: 69720 - DNA, 291 bp, Neisseria meningitidis; identical to SEQ ID NO: 60315

SEQ ID NO: 69721 - DNA, 2835 bp, Neisseria meningitidis; identical to SEQ ID NO: 60603

SEQ ID NO: 69722 - DNA, 258 bp, Neisseria meningitidis; identical to SEQ ID NO: 55346

SEQ ID NO: 69723 - DNA, 1008 bp, Neisseria meningitidis
atgagcaccttcttccagcaaaccgcccaagccatgattgccaaacacatcgaccgtttcccgctattgaagttggaccaggtgattgattggcagccgatcgaacaatacctgaaccgtcaaaaaacccgttaccttagagaccaccgcggccgtcccgcctatcccctgttgtccatgttcaaagccgtcctgctcggacaatggcacagcctctccgatcccgaactcgaacacagcctcatcacccgcatcgatttcaacctgttttgccgttttgacgaactgagcatccccgattacagcaccttatgccgctaccgcaactggctggcgcaagacgacaccctgtccgaattgctcaaactgattaaccgacaactgaccgaaaaaggcctaaaaatagagaaagcatccgccgccgtcgttgatgccaccattatccagaccgccggcagcaaacagcgtcaggccatagaagttgacgaagaaggacaaatcagcggtcaaaccacaccgagtaaggacagcgatgcccgttggataaagaaaaacggcctctacaaactcggttacaaacaacatacacgtaccgatgcggaaggctatatcgagaaactgcacatcacccccgccaatgcccatgagtgcaaacacctgtcgccgttgttggaagggttacccgaaggtacgaccgtctatgccgacaaaggctacgacagtgcggaaaaccggcaacatctggaagaacatcagttgttggacggcattatgcgcaaagcctgccgcaaccgcccgctgtcggaagtgcaaaccaaacgcaaccgatatttgtcgaagacccgttatgtggttgaacagagcttcggtacgctgcaccgtaaattccgctacgctcgggcagcctatttcggactgattaaagtgagtgcgcaaagccacctgaaggcgatgtgtttgaacctgttgaaagccgccaacaggctaagtgcgcccgctgccgcctaa

SEQ ID NO: 69724 - DNA, 495 bp, Neisseria meningitidis; identical to SEQ ID NO: 61091

SEQ ID NO: 69725 - DNA, 636 bp, Neisseria meningitidis; identical to SEQ ID NO: 55453

SEQ ID NO: 69726 - DNA, 234 bp, Neisseria meningitidis; identical to SEQ ID NO: 62216

SEQ ID NO: 69727 - DNA, 261 bp, Neisseria meningitidis; identical to SEQ ID NO: 42390

SEQ ID NO: 69728 - DNA, 330 bp, Neisseria meningitidis; identical to SEQ ID NO: 60433

SEQ ID NO: 69729 - DNA, 864 bp, Neisseria meningitidis; identical to SEQ ID NO: 55772

SEQ ID NO: 69730 - DNA, 702 bp, Neisseria meningitidis; identical to SEQ ID NO: 62027

SEQ ID NO: 69731 - DNA, 564 bp, Neisseria meningitidis; identical to SEQ ID NO: 61535

SEQ ID NO: 69732 - DNA, 1011 bp, Neisseria meningitidis; identical to SEQ ID NO: 61352

SEQ ID NO: 69733 - DNA, 378 bp, Neisseria meningitidis; identical to SEQ ID NO: 61134

SEQ ID NO: 69734 - DNA, 273 bp, Neisseria meningitidis; identical to SEQ ID NO: 37320

SEQ ID NO: 69735 - DNA, 657 bp, Neisseria meningitidis
atggattttgaaaaagcgcggttcaatatggtcgaacagcaaatccgtccttgggatgtattggattttgacgttttggacgctttggcggagattccgcgcgagctttttgtcgatgaggacttgcagggtttggcgtatgcggatatggcgctgccgcttgccaacgggcataagatgctcgagccgaaagttgtggcgcggctggcgcagggcttgaagctgacgaaaaacgatacggttttggaaatcggcacgggatcgggctatgcggccgcgctgttggcgaaactggctggtcgtgtggtttcggacgacatcgatgccgaacagcaaaagcgcgccaaagcggttttggacggcttgtctttggaaaacattgattatgtgcaaaacaacgggctgaccgaactttccgcaggcgcgccgtttgatgcggtttatgtcggcggcgcggtaaaccttgtgcctgaagtgttgaaagaacagttgaaagatggcggacgcatggcggttatcgtaggccgcaagcctgttcagcgcgcgcttttgattacgcgcaagggcgatgtgtttgaagagaaggtgctgttcgatactttggtggcgcatttggatgataaggatgccgatccgtttggcggtttcgatttttaa

SEQ ID NO: 69736 - DNA, 1239 bp, Neisseria meningitidis; identical to SEQ ID NO: 62003

SEQ ID NO: 69737 - DNA, 450 bp, Neisseria meningitidis; identical to SEQ ID NO: 55759

SEQ ID NO: 69738 - DNA, 762 bp, Neisseria meningitidis
atgaccgaattcgtcgtattgattccggcgcggctggattcgtcgcgcctgcccggaaaagccttggcggacatccacggcaaaccgatggtcgtgcgcgttgccgaacaggcggcaaaaagtaaagctgtgcgcgtcgtcgttgccaccgaccatcccgatattcagacggcctgtcaggcgcacggcgtcgaagtcgtcatgacttcaaaccggcacgaaagcggcacgacgcgccttgccgaagcctctgccgcgctgaagctgccgccgcatctggtggttgtcaacgtacagggcgacgagccgctgattgcacctgaactcatcgaccgcaccgccgaagtactcgtcgaaaacaacgtccaaatggcgaccgccgcccacgaattgcacgatttcgacgaattgatgaatcccaatgccgtcaaagttgtcctcgacaaaaaccgcaacgccatctacttcagccgcgccccgattccctatccgcgcgatgcgatgcgtgcaggaaaacgcgaaatgccgtttgaaaccgccgtcctgcgccatatcggcatctacgcctaccgcgtcggcttcctgcaacgctacaccgaaatgagagtttcgccgctggaaaccattgaatcgctggagcaactgcgtgtcctgtggcacggctacccgattgccgtcgaaaccgccaaagaagctcctgccgccggcgtagatacgcaggaggatttggacaggattcgcgctgtatttcagactatataa

SEQ ID NO: 69739 - DNA, 2664 bp, Neisseria meningitidis; identical to SEQ ID NO: 60482

SEQ ID NO: 69740 - DNA, 459 bp, Neisseria meningitidis; identical to SEQ ID NO: 54671

SEQ ID NO: 69741 - DNA, 444 bp, Neisseria meningitidis; identical to SEQ ID NO: 55663

SEQ ID NO: 69742 - DNA, 363 bp, Neisseria meningitidis; identical to SEQ ID NO: 43221

SEQ ID NO: 69743 - DNA, 672 bp, Neisseria meningitidis; identical to SEQ ID NO: 47737

SEQ ID NO: 69744 - DNA, 360 bp, Neisseria meningitidis; identical to SEQ ID NO: 54420

SEQ ID NO: 69745 - DNA, 204 bp, Neisseria meningitidis; identical to SEQ ID NO: 55124

SEQ ID NO: 69746 - DNA, 633 bp, Neisseria meningitidis; identical to SEQ ID NO: 54940

SEQ ID NO: 69747 - DNA, 1743 bp, Neisseria meningitidis; identical to SEQ ID NO: 60296

SEQ ID NO: 69748 - DNA, 378 bp, Neisseria meningitidis; identical to SEQ ID NO: 36713

SEQ ID NO: 69749 - DNA, 2037 bp, Neisseria meningitidis; identical to SEQ ID NO: 61365

SEQ ID NO: 69750 - DNA, 789 bp, Neisseria meningitidis; identical to SEQ ID NO: 55632

SEQ ID NO: 69751 - DNA, 132 bp, Neisseria meningitidis; identical to SEQ ID NO: 38518

SEQ ID NO: 69752 - DNA, 1116 bp, Neisseria meningitidis; identical to SEQ ID NO: 65825

SEQ ID NO: 69753 - DNA, 285 bp, Neisseria meningitidis; identical to SEQ ID NO: 37122

SEQ ID NO: 69754 - DNA, 693 bp, Neisseria meningitidis; identical to SEQ ID NO: 55087

SEQ ID NO: 69755 - DNA, 2121 bp, Neisseria meningitidis; identical to SEQ ID NO: 54763

SEQ ID NO: 69756 - DNA, 177 bp, Neisseria meningitidis; identical to SEQ ID NO: 55652

SEQ ID NO: 69757 - DNA, 192 bp, Neisseria meningitidis; identical to SEQ ID NO: 43532

SEQ ID NO: 69758 - DNA, 1518 bp, Neisseria meningitidis; identical to SEQ ID NO: 61500

SEQ ID NO: 69759 - DNA, 1410 bp, Neisseria meningitidis
atgaaatacatcagcacgcgcggcgaaaccgcacacaaaccgttcagcgaagttttattgatggggcttgcccccgacggcggtctgatgctgccggaacattatccgcaaatcgggcgcgaaaccttggacaaatggcgcggttcggcttatcccgaattggcgtttgaaattatgcgcctgttcgttacggatattccggaggacgatttgcgcgacattctgaaccgtacttacacggaagcggcgttcggtactaaggaaatcacccccgtccgcacgctttcagacggcatcaaaatccaagccttgtccaacggcccgacgctggcgttcaaagatatggcaatgcagtttttgggcaatgcgtttgaatatgttttaaacaaagaaggcaaaaaactcaatatcttgggcgcgaccagcggcgatacgggttcggctgcggaatatgccttgcgcggcaaaaagggcgtgaacgtatttatgttgtcgcccgacggtaaaatgagcgcgttccaacgcgcgcaaatgtacagcctgcaagacgagaatatccacaatatcgccgtgaagggaatgtttgacgactgtcaggatattgtgaaggcggtgcagaacgatgccgcgttcaaggaaaaataccatatcggtacggtcaactcgatcaactggggacgcatcgtcgcgcaagtggtttattactttgcaggctatttcaacgccacttcaagcaatgacgaaaccgtcagcttctgcgtaccgagcggcaacttcggcaatgtttgcgcgggacacattgccaaacaaatgggcctgcctatccgccgcctgattgtcgcgaccaatgaaaacgatgtgttggacgagtttttcaaaaccggtgcataccgcccgcgcaacagcgcgcatacttatgtaacctccagcccgtctatggacatttccaaagcgtccaacttcgagcgtttcgtgttcgacctgatggatcgcgatcctgcggaaatcaatacgctgtgggcggaagtggctgcaggcaaaggctttgacctgcgatttgccttggacaaagtcggtggcaaatacggttttacctctggcaaatccacccacgccgaccgcctcgccaccatcaagcaggtttacgagcaagaccaagaactcatcgacccgcacactgccgacggcgtaaaagtcgcccgcgaagtgcgcgaagaaggtgaaatggtggtttgtttggaaaccgcgttggcggcgaaattcgatgcgaccatacgcgaagccgtcggcgatgccgccattccgcgccctgccgcgctggaaggtttggaaaacctgccgcagcgcgtgcaaaccgtgccgaacagtgcggatgcggtaaaaggcatcatcgaacaaacccttgcctga

SEQ ID NO: 69760 - DNA, 828 bp, Neisseria meningitidis; identical to SEQ ID NO: 48305

SEQ ID NO: 69761 - DNA, 642 bp, Neisseria meningitidis; identical to SEQ ID NO: 55159

SEQ ID NO: 69762 - DNA, 939 bp, Neisseria meningitidis; identical to SEQ ID NO: 62034

SEQ ID NO: 69763 - DNA, 360 bp, Neisseria meningitidis; identical to SEQ ID NO: 55655

SEQ ID NO: 69764 - DNA, 729 bp, Neisseria meningitidis; identical to SEQ ID NO: 54983

SEQ ID NO: 69765 - DNA, 489 bp, Neisseria meningitidis; identical to SEQ ID NO: 55374

SEQ ID NO: 69766 - DNA, 759 bp, Neisseria meningitidis; identical to SEQ ID NO: 61752

SEQ ID NO: 69767 - DNA, 456 bp, Neisseria meningitidis; identical to SEQ ID NO: 61195

SEQ ID NO: 69768 - DNA, 987 bp, Neisseria meningitidis; identical to SEQ ID NO: 55490

SEQ ID NO: 69769 - DNA, 336 bp, Neisseria meningitidis; identical to SEQ ID NO: 44858

SEQ ID NO: 69770 - DNA, 945 bp, Neisseria meningitidis; identical to SEQ ID NO: 54346

SEQ ID NO: 69771 - DNA, 1671 bp, Neisseria meningitidis; identical to SEQ ID NO: 38983

SEQ ID NO: 69772 - DNA, 657 bp, Neisseria meningitidis; identical to SEQ ID NO: 60760

SEQ ID NO: 69773 - DNA, 633 bp, Neisseria meningitidis; identical to SEQ ID NO: 54518

SEQ ID NO: 69774 - DNA, 1221 bp, Neisseria meningitidis
ttggataagtgggaaattaccataatggcgaaaatcattacgccgctgtcggcaaatcaggttaaaaatgcgaagccgcgcgataagctgtataagttgtcagacgggggcgggctggctttgtgggtctacccgacgggcgggcggagttggaagctgtcgtttgtgcaggatggaaggcagcagacaatttcgctggggcggtatcctgatttttcgctggccgatgcgcgggaatggcgggaggaggtgcgccgaaaacgggcgcacggggaaaatgtcgtcaataagaaggtgcgggcggattttgcttttgagaaggtgacgcgtgattggtttgtgcgttggtcgaaggggcggtctgaaaagtatgccggacaggttatgcggaattttgaacggtgggtttttccggctatcggcaatcttgatattcgccaggtcaggacggcggatgtggtcggctgcctccgtgtgatggaggcgcgcggtatcgttgatacgttgcgcaaaacgaaaaacagtctgaagatggtgtttgcgtttgcggtcggttcgggaatgatggaaatcaaccctgtcgcgcaaatcggttcgggtgtgtttgaacgggcgaaaacggggaatatggcagcgttgagtccgtctgaattgccgcgcctgattgattttttggagcagcgcaatgaatttgcggtttatgcgggcagggtgcgtatccatcctgtaacgcggctttgtatctattggctgctgttgacaatgacgcggattcaggaggcggcgttgatggagtggtcggagttggacggggaggtttggcgtatccccgccgaacggaaaaaggagcggcgggggcatgatgtgccgctgtcgcgggcgatgcagtgggtgttggatcaggcgcgggcgttgaatgtgaacgggcggtttgtgtttgaaagtgtgaattttcaagggcatatcaataaggaaagtccgcgcgtggcgatgcagcgggcggggctggatacgacggcgcacggtttgcgctcgcttgcgcgtacttatttgcgcgaggttctgaaggtggataatgatgtggcggaaaagctgcttgcccattcgttggggacgaggacgcaaacggcttacaaccgctcggagctttgggaggagcgtaaggatgcgctggaacggtgggggaatgatgttttgaggcttgccaaaaacggaaaatga

SEQ ID NO: 69775 - DNA, 837 bp, Neisseria meningitidis; identical to SEQ ID NO: 61277

SEQ ID NO: 69776 - DNA, 1287 bp, Neisseria meningitidis; identical to SEQ ID NO: 54876

SEQ ID NO: 69777 - DNA, 378 bp, Neisseria meningitidis; identical to SEQ ID NO: 36526

SEQ ID NO: 69778 - DNA, 1827 bp, Neisseria meningitidis; identical to SEQ ID NO: 62067

SEQ ID NO: 69779 - DNA, 492 bp, Neisseria meningitidis; identical to SEQ ID NO: 54307

SEQ ID NO: 69780 - DNA, 372 bp, Neisseria meningitidis
atgaataaaaccttgtctattttgccggtggcaatcttactcggcggctgcgccgccggaggcggtaacacattcggcagcttagacggtggcacaggcatgggcggcagcatcgtcaaaatggcggttgggagccaatgccgtgcggaattggacaaacgcagcgaatggcgtttgaccgcgctggcgatgagtgccgaaaaacaggcggagtgggaaaacaagatttgcgcttgcgtcgcccaagaagcacccgaacggatgaccggcaacgatgtgatgcagatgctggcttcgtccacgcgcaatcaggcacttgccgccctgaccgccaaaacggtttccgcctgcttcaaacacctgtaccgctaa

SEQ ID NO: 69781 - DNA, 951 bp, Neisseria meningitidis; identical to SEQ ID NO: 42789

SEQ ID NO: 69782 - DNA, 1155 bp, Neisseria meningitidis; identical to SEQ ID NO: 61438

SEQ ID NO: 69783 - DNA, 1104 bp, Neisseria meningitidis; identical to SEQ ID NO: 39574

SEQ ID NO: 69784 - DNA, 936 bp, Neisseria meningitidis; identical to SEQ ID NO: 54416

SEQ ID NO: 69785 - DNA, 750 bp, Neisseria meningitidis; identical to SEQ ID NO: 61466

SEQ ID NO: 69786 - DNA, 915 bp, Neisseria meningitidis; identical to SEQ ID NO: 51855

SEQ ID NO: 69787 - DNA, 2145 bp, Neisseria meningitidis; identical to SEQ ID NO: 54934

SEQ ID NO: 69788 - DNA, 1170 bp, Neisseria meningitidis; identical to SEQ ID NO: 61271

SEQ ID NO: 69789 - DNA, 966 bp, Neisseria meningitidis; identical to SEQ ID NO: 42327

SEQ ID NO: 69790 - DNA, 1356 bp, Neisseria meningitidis
atgtcggaatatacgcctcaaacagcaaaacaaggtttgcccgcgctggcaaaaagcacgatttggatgctcagtttcggctttctcggcgttcagacggcctttaccctgcaaagctcgcagatgagccgcatcttccagacgctcggtgccgatccgcacagcctcggctggttctttatcctgccgccgctggcggggatgctggtgcagccgattgtcggccattactccgaccgcacttggaagccgcgtttgggcggccgccgtctgccgtatctgctttatggcacgctgattgcggttattgtgatgattttgatgccgaactcgggcagcttcggtttcggctatgcgtcgctggcggctttgtcgttcggcgcgctgatgattgcgctgttggacgtgtcgtcaaatatggcgatgcagccgtttaagatgatggtcggcgacatggtcaacgaggagcagaaaggctacgcctacgggattcaaagtttcttagcaaatacgggcgcggtcgtggcggcgattctgccgtttgtgtttgcgtatatcggtttggcgaacaccgccgagaaaggcgttgtgccacaaaccgtggtcgtagcattctatgtgggcgcggcattactgattattaccagtgcgttcacaatcttcaaagtcaaagaatacgacccggaaacctatgcccgttaccacggcatcgatgtcgccgcgaatcaggaaaaagccaactggttcgaactcttaaaaacggcacctaaagcgttttggacggttactctggtacagtttttctgctggttcgccttccaatatatgtggacttactcggcaggcgcgattgcggaaaacgtctggcacaccactgatgcgtcttccgtaggttatcaggaggcgggcaactggtacggcgttttggcggcggtgcagtcggttgcggcggtgatttgttcgtttgtattggcgaaagtgccgaataaataccataaggcgggttatttcggctgtttggctttgggcgcgctcggctttttctccgttttcttcatcggcaaccaatacgcgctggtgttgtcttataccttaatcggcatcgcttgggcgggcattatcacttatccgctgacgattgtaaccaacgccttgtcgggcaagcatatgggcacttacttgggcctgtttaacggctctatctgtatgccgcaaatcgtcgcttcgctgttgagtttcgtgcttttcccgatgatgggcggtttgcaggccaatatgttcttggtagggggcgtcgtcctgctgctgggcgcgttttccgtgttcctgattaaagaaacacacggcggggtttga

SEQ ID NO: 69791 - DNA, 837 bp, Neisseria meningitidis; identical to SEQ ID NO: 60639

SEQ ID NO: 69792 - DNA, 510 bp, Neisseria meningitidis; identical to SEQ ID NO: 36289

SEQ ID NO: 69793 - DNA, 924 bp, Neisseria meningitidis; identical to SEQ ID NO: 60831

SEQ ID NO: 69794 - DNA, 918 bp, Neisseria meningitidis
atgtctgtctataccagtgtttccgatgatgaaatgcgcggcttcctgagcggttacgatttgggggaatttgtttccctgcagggcatcgcgcaggggattaccaacagcaattattttctgacgacgacttcgggacgttatgtgctgaccgtgtttgaagtgttgaaacaggaagagctgccgttttttctggagcttaaccggcatttgagtatgaagggcgtggcggttgccgcgccggttgcgcgcaaagacggccggcttgattccgttttggcgggcaagccggcttgtttggttgcctgcctgaaaggttcggataccgcgctgccgacggcggagcagtgtttccataccggtgcgatgctggccaaaatgcaccttgccgccgccgatttccctttggaaatggaaaacccgcgttacgatgcgtggtggacggaggcgtgcacccggctgctgcccgtcctgtcgcaagacgatgccgcgctgctgtgttccgaaatcgatgcgttaaaggacaatctcggcaatcatctgccttcgggcatcatccatgccgatttgtttaaagacaatgtgttgcttgacggcggtcaggtatcgggtttcatcgatttctattatgcctgccggggcaattttatgtatgacttggcgattgcggtcaacgattgggcaaggacggcggacaataagttggatgaggcgttgaaaaaggtgtttatcggcggttatgagggcgtgcgccccttgagtgccgaagaaaaggcgtatttcccgaccgcccaacgtgccggctgcatccgtttttgggtgtcgcgcctgttggactttcattttccgcaggcgggcgagatgacgtttatcaaagacccgaacgcgttccgcaacctgctgttgagtttggattga

SEQ ID NO: 69795 - DNA, 780 bp, Neisseria meningitidis; identical to SEQ ID NO: 38358

SEQ ID NO: 69796 - DNA, 738 bp, Neisseria meningitidis
atggctttgcaagatcgtaccggtcaaaaagtaccttccgtagtattccgcacccgcgttggcgacacttggaaagatgtgtctaccgatgatttgttcaaaggcaaaaaagtagtcgtattctccctgcctggtgcatttaccccgacttgttcttcttcacacctgccgcgttacaacgaattgttcggcgcgttcaaagaaaacggcgttgacgcaatctactgcgtatctgtaaacgatactttcgtaatgaacgcttgggcggccgaagaagaatccgacaacatctacatgattcctgacggcaacggcgaattcaccgaaggcatgggcatgttggtcggtaaagaagacttgggcttcggcaaacgttcttggcgttactccatgctggttaacgacggcgtggttgaaaaaatgttcatcgagccggaagaaccaggagatccgttcaaagtatccgatgcagatactatgctgaaattcgttgctcccaattggaaggctcaagagtctgttgccatctttaccaaacccggctgccaattctgtgctaaagccaaacaagccctgcaagacaaaggtttgtcttacgaagaaatcgtattgggcaaagatgcaaccgttacttccgttcgcgccattaccggcaagatgactgccccgcaagtcttcatcggcggtaaatacatcggcggcagcgaagatttggaagcttacttggctaaaaactga

SEQ ID NO: 69797 - DNA, 825 bp, Neisseria meningitidis; identical to SEQ ID NO: 55517

SEQ ID NO: 69798 - DNA, 132 bp, Neisseria meningitidis
atgcgtgatttcgacaaattggctgaagaagctgccgaacacgccgctgaaggcgcggtgaaattcatagacggcaagcctgccaagaaaatcatcgccgtaccgggcagactggcgaacatcgtggtgtaa

SEQ ID NO: 69799 - DNA, 447 bp, Neisseria meningitidis; identical to SEQ ID NO: 60428

SEQ ID NO: 69800 - DNA, 1002 bp, Neisseria meningitidis
atgaaacggaaaatttggctgctgccgctgctggcggtttcggcatacctgcaggcgcagacggaagtcaggctggcggtgcataagtcgttcagcctgcccaaagggctgattgcgcgcttcgagcgggcaaacgatgcgaaggtgtcgattattcaggcgggcggcgcgaacgaaatgctcaacaaactgattttgagccgcgccaacccgatcgccgacgcggtgtacggcttggacaacgccaatatcggcaaggcgcgggaaatgggcattttggcggcggcgcaacccggatccgcccccgtcgcggtcgggctgccttcggctttggcggtcgattacggctatgtgtccatcaattacgacaaaaaatggtttgaaggcaaaaagcttcctctgccgcaaaccctgcaggatttgacccgccccgaatataaaaacctattggtcgtgccgtctcccgccacgtcgtccccggggctgggcttcctgatggcgaacatcagcggtctgggcgaagaaggcgcgttcaaatggtgggcacagatgcggcagaacggcgtgaaggtcgccaaaggctggagcgaggcgtattacaccgacttttcgcacaacggcggcgcgtatccgctggtggtcggttatgccgccagcccggcggcggaagtgtatttttccaaaggcaaatacagcgagccgccgacgggcaacctgtttttaaaaggcggcgtattccgccaggtcgaaggcgcggcggtcttgaagggcgcgaaacagccggaattggcggcaaaactggtgcaatggctgcaaagtcgggaagtgcagcaggcggttccgtccgaaatgtgggtttaccccgccgtcaaaaacacgcgcctgcccgacgtgttccgcttcgcccaagccccgacgcacaccaccgcccccgcgcagcgcgatattgatgcgaaccagcgcggatgggtttcccgttggattagaacggttttgaaataa

SEQ ID NO: 69801 - DNA, 120 bp, Neisseria meningitidis; identical to SEQ ID NO: 43584

SEQ ID NO: 69802 - DNA, 390 bp, Neisseria meningitidis; identical to SEQ ID NO: 69190

SEQ ID NO: 69803 - DNA, 291 bp, Neisseria meningitidis; identical to SEQ ID NO: 60315

SEQ ID NO: 69804 - DNA, 309 bp, Neisseria meningitidis; identical to SEQ ID NO: 36432

SEQ ID NO: 69805 - DNA, 324 bp, Neisseria meningitidis
atgacgggatttaatgatgccgccggcgtggcatccgcctccgacatcaaaggcaaatatgttgagaaagttgaagtcaaaaacggcgtcgttaccgccgaaatggcttcaagcaacgtaaacaaagaaatccaaggcagaaaactctccctgtgggccaagcgtcaagccggttcggtaaaatggttctgcggacagccggttacgcgcgccgacaaagccaccgacgccgacgccgacgtcaccgccgacagcggcaacgaaaaaatcgacaccaagcacctgccgtcaacagcaccgacaagaaaatcgacaccaaactag

SEQ ID NO: 69806 - DNA, 831 bp, Neisseria meningitidis; identical to SEQ ID NO: 54954

SEQ ID NO: 69807 - DNA, 213 bp, Neisseria meningitidis; identical to SEQ ID NO: 55644

SEQ ID NO: 69808 - DNA, 1101 bp, Neisseria meningitidis
atggaaacacagctttacatcggcatcatgtcgggaaccagtatggatggggcggatgccgtgctggtacggatggacggcggcaaatggctgggcgcggaagggcacgcctttaccccctaccccggcaggttacgccgcaaattgctggatttgcaggacacaggcgcggacgaactgcaccgcagcaggatgttgtcgcaagaactcagccgcctgtacgcgcaaaccgccgccgaactgctgtgcagtcaaaacctcgcgccgtccgacattaccgccctcggctgccacgggcaaaccgtcagacacgcgccggaacacagttacagcgtacagcttgccgatttgccgctgctggcggaacggactcagatttttaccgtcggcgacttccgcagccgcgaccttgcggccggcggacaaggtgcgccgctcgtccccgcctttcacaaagccctgttccgcgatgacaaagaaacacgcgtggtactgaacatcggcgggattgccaacatcagcgtactcccctccgacgcacccgccttcggcttcgacacagggccgggcaatatgctgatggacgcgtggacgcaggcacactggcagttgccttacgacaaaaacggtgaaaaagcggcacaaggcaacatattgccgcaactgctcgacaggctgctcgcccacccgtatttcgcacgaccccaccccaaaagcacggggcgcgaactgtttgccctaaattggctcgaaacctaccttgacggcggcgaaaaccgatacgacgtattacggacgctttcccgttttaccgcgcaaaccgttttcgacgccgtctcacacgcagcggcagatgcccgtcaaatgtacatttgcggcggcggcatccgcaatcctgttttaatggcggatttggcagactgtttcggcacacgcgtttccctacgcagcaccgccgaactgaagctcgatccgcaatgggtggaagcagccgcatttgcgtggttggcggcgtgttggattaatcgcattcccggtagtccgcacaaagcaaccggcgcatccaaaccgtgtattctgggcgcgggatattattattga

SEQ ID NO: 69809 - DNA, 1419 bp, Neisseria meningitidis; identical to SEQ ID NO: 54234

SEQ ID NO: 69810 - DNA, 522 bp, Neisseria meningitidis; identical to SEQ ID NO: 55550

SEQ ID NO: 69811 - DNA, 2277 bp, Neisseria meningitidis; identical to SEQ ID NO: 61613

SEQ ID NO: 69812 - DNA, 1116 bp, Neisseria meningitidis; identical to SEQ ID NO: 61619

SEQ ID NO: 69813 - DNA, 1248 bp, Neisseria meningitidis; identical to SEQ ID NO: 54413

SEQ ID NO: 69814 - DNA, 546 bp, Neisseria meningitidis; identical to SEQ ID NO: 39943

SEQ ID NO: 69815 - DNA, 924 bp, Neisseria meningitidis; identical to SEQ ID NO: 39069

SEQ ID NO: 69816 - DNA, 606 bp, Neisseria meningitidis
atgccgtctgaaatgcggatgtcccgattgatgttattgctgtcggcatttgtgcttgctgcgtgtaatgcccaaaaccggcaatcctgtgtacggcatcaggatttcgcacgtgtagccgtcgatttgtttcggagtgcctgcgtcctgactcaaggcagtttcgaaccagtttccaagtttgccgctgtcggacattttgtccctgtcggaaaggaagacctgtcccgtctgccgcccgctgttgcagaacccgatgtacaggcgttgtggacgcttgaacgcgatggcggcatttattatttgagcctgccgcgcgactgttgcagtgtgaaagccgagcgggcagacagtgccgtgcttttggaacattttgacggacttgtccgacagccgccgaaaaataccaatatagaattgagggctgaacagtcggtgcaggcactgtttgaaaccaggcaaatcagctatgcctggcgggaatcgggcagccccgaagaaaccgtattgaccgcacaaaccgccgattccccggatttgcccgtacaggcagttttgaacctgacgcaccgttcccacaacgggaaacccctaattctcccctaa

SEQ ID NO: 69817 - DNA, 1104 bp, Neisseria meningitidis; identical to SEQ ID NO: 55122

SEQ ID NO: 69818 - DNA, 624 bp, Neisseria meningitidis; identical to SEQ ID NO: 37310

SEQ ID NO: 69819 - DNA, 849 bp, Neisseria meningitidis
atggacttcaaacaatttgattttttacacctgatcagtgtttccggttgggagcatctggctgaaaaggcgtgggcgttcgggctgaaccttgccgccgcgctgcttatttttttggtcggaaaatgggcggcgaaacgcattgtcgccgtgatgagggcggcgatgacgcgcgcgcaggtcgatgccacgctgattagttttttgtgtaatgttgccaatatcggcttattgattttggtgattattgccgcattgggcagattgggcgtttccacaacatccgtaaccgccttaatcggcggcgcgggtttggcggtggcgttgtccttgaaagaccagctgtccaattttgccgccggcgcgctgattatcctgttccgcccgttcaaagtcggcgattttatccgcgtcggcggttttgaaggatatgtccgagagattaaaatggtgcagacttctttgcggacgaccgacaacgaagaagtcgtgctgcccaacagcgtggtgatgggcaacagcatcgtcaaccgttccacactgccgctgtgccgcgcccaagtgatagtcggcgtcgattacaactgcgatttgaaagtggcgaaagaggcggtgttgaaagccgccgtcgaacaccccttgagcgttcaaaacgaagagcggcaggccgccgcctacatcaccgccttgggcgacaatgccatcgaaatcacattatgggcttgggcaaacgaagcagaccgctggacgctgcaatgcgacttgaacgaacaagtggtcgaaaacctccgcaaagtcaatatcaacatcccgttcccgcaacgcgacatacacatcatcaattcttaa

SEQ ID NO: 69820 - DNA, 624 bp, Neisseria meningitidis
atgatgaaaccgcacaacctgttccaatttctcgccgtttgctccctgaccgtctccgtcgcttccgcacaggcgggcgcggtggacgcgctcaagcaattcaacaacgatgccgacggtatcagcggcagcttcacccaaaccgtccaaagcaaaaagaaaacccaaaccgcgcacggcacgttcaaaatcctgcgcccgggcctcttcaaatgggaatacacttcgccctacaaacagactattgtcggcgacggtcaaaccgtttggctctacgatgtcgatttggcacaagtgaccaagtcgtcccaagaccaggccataggcggcagccccgccgccatcctgtcgaacaaaaccgccctcgaaagcagctacacgctgaaagaggacggttcgtccaacggcatcgattatgtgctggcaacgcccaaacgcaacaatgccggctaccaatacatccgcatcggcttcaaaggcggcaacctcgccgccatgcagcttaaagacagcttcggcaaccaaacctccatcagtttcggcggtttgaataccaatccccaactctcgcgcggcgcgttcaagtttaccccgcccaaaggcgtggacgtgttgagcaactga

SEQ ID NO: 69821 - DNA, 360 bp, Neisseria meningitidis; identical to SEQ ID NO: 36598

SEQ ID NO: 69822 - DNA, 1407 bp, Neisseria meningitidis; identical to SEQ ID NO: 60886

SEQ ID NO: 69823 - DNA, 1185 bp, Neisseria meningitidis; identical to SEQ ID NO: 37431

SEQ ID NO: 69824 - DNA, 660 bp, Neisseria meningitidis; identical to SEQ ID NO: 44247

SEQ ID NO: 69825 - DNA, 516 bp, Neisseria meningitidis; identical to SEQ ID NO: 55128

SEQ ID NO: 69826 - DNA, 561 bp, Neisseria meningitidis; identical to SEQ ID NO: 54395

SEQ ID NO: 69827 - DNA, 732 bp, Neisseria meningitidis; identical to SEQ ID NO: 55917

SEQ ID NO: 69828 - DNA, 1170 bp, Neisseria meningitidis
ttgcacaaagcctgctgcaagcctaaaatcgggcgggttattgttcagaatcaaggctgcatcatgtctctttatccgatttacaatttttccgccggccctgccgtattgcccgaagccgtgttggaaacggcgcggcaggaaatgttggactacaacggtacgggttttcctgtgatggcgatgagccaccgttcggaaatgtttttgagcatcctgcatcatgcggaacaggatttgaggcagcttttgaaagtgcctgacaactataagatattgtttctgcagggcggagcaacaacccaatttaatatggcagccatgaatctggcacacggtttccgcactgccgacgcggtggtaacgggcaactggagccgtatcgcttatgaacagatgagccgtttgaccgatacggaaatccgtttggcggcgcatggcggcgagcagttcgactatctcgacctgccgcctgtggaaacgtgggatgttgcacccgattcggcgtttgtccattttgccgtcaatgaaacggtcaacgggctgcaataccgtgaagtgccgcgcctttcagaaggcatgccgccgctggtgtgcgatatgtccagcgagattttgtcgcgcgagtttgatgttgccgactacggactgatttacgcaggcgcacagaaaaacatcgggccggcaggggttacggtggtgattgtgcgtgaggatttgctcgagcgttgtccgaacgatattcccgatgtgttcaactaccgttcgcatttgaaccgcgaaggtatgtacaacacgccgtcaacttacgcgatttatatgtcggggctggtgttccgctggctgcaggcgcagggcggtgtgaaaaaaattgaagcggtcaatcggctgaaggcgcaaaccttgtatgagacgatagacggcagcggcggtttctatatcaaccgtatccgtccgaatgcgcgttctaaaatgaatgtcgtgttccaaacgggggatgaggagcttgaccgccgttttgtgctggaagccgaattgcagggcttgtgcctgttgaagggctataagtctgtcggtgggatgcgcgccagcatctacaatgcgatgccgctcgaaggcgtgcgggctttggcagattttatgcgcgatttccaacggcgttacggttga

SEQ ID NO: 69829 - DNA, 675 bp, Neisseria meningitidis; identical to SEQ ID NO: 54660

SEQ ID NO: 69830 - DNA, 753 bp, Neisseria meningitidis; identical to SEQ ID NO: 38392

SEQ ID NO: 69831 - DNA, 1470 bp, Neisseria meningitidis; identical to SEQ ID NO: 43805

SEQ ID NO: 69832 - DNA, 1179 bp, Neisseria meningitidis
atggcaaaaatgatgaaatgggcggctgttgcggcggtcgcggcggcagcggtttggggcggatggtcttatctgaagcccgagccgcaggctgcttatattacggaagcggtcaggcgcggcgacatcagccggacggtttctgcaacaggggagatttcgccgtccaacctggtatcggtcggcgcgcaggcatcggggcagattaagaaactttatgtcaaactcgggcaacaggttaaaaagggcgatttgattgcggaaatcaattcgacctcgcagaccaatacgctcaatacggaaaaatccaagttggaaacgtatcaggcgaagctggtgtcggcacagattgcattgggcagcgcggagaagaaatataagcgtcaggcggcgttatggaaggaaaacgcgacttccaaagaggatttggaaagcgcgcaggatgcgtttgccgccgccaaagccaatgttgccgagctgaaggctctaatcagacagagcaaaatttccatcaataccgccgagtcggaattgggctacacgcgcattaccgcaacgatggacggcacggtggtagcgattctcgtggaagaggggcagactgtgaacgcggcgcagtctacgccgacgattgtccaattggcgaatctggatatgatgttgaacaaaatgcagattgccgagggcgatattaccaaggtgaaggcggggcaggatatttcgtttacgattttgtccgaaccggatacgccgattaaggcgaagctcgacagcgtcgaccccgggctgaccacgatgtcgtcgggcggctacaacagcagtacggatacggcttccaatgcggtctactattatgcccgttcgtttgtgccgaattcggacggcaaactcgccacggggatgacgacgcagaatacggttgaaatcgacggcgtgaaaaatgtgctgattattccgtcgctgaccgtgaaaaatcgcggcggcaaggcgtttgtgcgcgtgttgggtgcggatggcaaggcggcggaacgcgaaatccggaccggtatgagagacagtatgaataccgaagtaaaaagcgggttgaaagagggggataaagtggtcatctccgaaataaccgccgccgagcagcaggaaagcggcgaacgcgccctaggcggcccgccgcgccgataa

SEQ ID NO: 69833 - DNA, 585 bp, Neisseria meningitidis; identical to SEQ ID NO: 62014

SEQ ID NO: 69834 - DNA, 285 bp, Neisseria meningitidis; identical to SEQ ID NO: 60402

SEQ ID NO: 69835 - DNA, 1785 bp, Neisseria meningitidis
atgaacaaaatataccgcatcatttggaatagtgccctcaatgcctgggtcgtcgtatccgagctcacacgcaaccacaccaaacgcgcctccgcaaccgtggcgaccgccgtattggcgacactgttgtttgcaacggttcaggcgaatgctaccgatgacgacgatttatatttagaacccgtacaacgcactgctgtcgtgttgagcttccgttccgataaagaaggcacgggagaaaaagaaggtacagaagattcaaattgggcagtatatttcgacgagaaaagagtactaaaagccggagcaatcaccctcaaagccggcgacaacctgaaaatcaaacaaaacaccaatgaaaacaccaatgacagtagcttcacctactccctgaaaaaagacctcacagatctgaccagtgttgaaactgaaaaattatcgtttggcgcaaacggtaataaagtcaacatcacaagcgacaccaaaggcttgaattttgcgaaagaaacggctgggacgaacggcgaccccacggttcatctgaacggtatcggttcgactttgaccgatacgctgctgaataccggagcgaccacaaacgtaaccaacgacaacgttaccgatgacgagaaaaaacgtgcggcaagcgttaaagacgtattaaacgcaggctggaacattaaaggcgttaaacccggtacaacagcttccgataacgttgatttcgtccgcacttacgacacagtcgagttcttgagcgcagatacgaaaacaacgactgttaatgtggaaagcaaagacaacggcaagaaaaccgaagttaaaatcggtgcgaagacttctgttattaaagaaaaagacggtaagttggttactggtaaaggcaaagacgagaatggttcttctacagacgaaggcgaaggcttagtgactgcaaaagaagtgattgatgcagtaaacaaggctggttggagaatgaaaacaacaaccgctaatggtcaaacaggtcaagctgacaagtttgaaaccgttacatcaggcacaaatgtaacctttgctagtggtaaaggtacaactgcgactgtaagtaaagatgatcaaggcaacatcactgttaagtatgatgtaaatgtcggcgatgccctaaacgtcaatcagctgcaaaacagcggttggaatttggattccaaagcggttgcaggttcttcgggcaaagtcatcagcggcaatgtttcgccgagcaagggaaagatggatgaaaccgtcaacattaatgccggcaacaacatcgagattacccgcaacggtaaaaatatcgacatcgccacttcgatggcgccgcagttttccagcgtttcgctcggtgcgggggcggatgcgcccactttgagcgtggatgacgagggcgcgttgaatgtcggcagcaaggataccaacaaacccgtccgcattaccaatgtcgccccgggcgttaaagagggggatgttacaaacgtcgcacaacttaaaggcgtggcgcaaaacttgaacaaccgcatcgacaatgtggacggcaacgcgcgtgcgggcatcgcccaagcgattgcaaccgcaggtctagttcaggcgtatctgcccggcaagagtatgatggcgatcggcggcgacacttatcgcggcgaagccggttacgccatcggctactccagtatttccgacggcggaaattggattatcaaaggcacggcttccggcaattcgcgcggccatttcggtgcttccgcatctgtcggttatcagtggtaa

SEQ ID NO: 69836 - DNA, 855 bp, Neisseria meningitidis; identical to SEQ ID NO: 55306

SEQ ID NO: 69837 - DNA, 714 bp, Neisseria meningitidis; identical to SEQ ID NO: 41313

SEQ ID NO: 69838 - DNA, 474 bp, Neisseria meningitidis; identical to SEQ ID NO: 49535

SEQ ID NO: 69839 - DNA, 1434 bp, Neisseria meningitidis; identical to SEQ ID NO: 61757

SEQ ID NO: 69840 - DNA, 924 bp, Neisseria meningitidis; identical to SEQ ID NO: 61120

SEQ ID NO: 69841 - DNA, 324 bp, Neisseria meningitidis; identical to SEQ ID NO: 37673

SEQ ID NO: 69842 - DNA, 423 bp, Neisseria meningitidis; identical to SEQ ID NO: 54466

SEQ ID NO: 69843 - DNA, 393 bp, Neisseria meningitidis; identical to SEQ ID NO: 36603

SEQ ID NO: 69844 - DNA, 1467 bp, Neisseria meningitidis; identical to SEQ ID NO: 39882

SEQ ID NO: 69845 - DNA, 1251 bp, Neisseria meningitidis
atgttttcaaaaagcgttaccctcgcacaatatgaccccgatttggcagcagccattgcccaagaagaccaacgccagcaagaccacgtcgagctgattgcctctgaaaactacgtcagctgcgccgtaatggaaacgcaaggttcccagctgaccaacaaatacgccgaaggctaccccggcaaacgctactacggcggctgcgaatacgtcgatattgtcgaacaattggcgattgaccgcgtcaaaaaactgttcggcgcgcagtacgccaacgtccaaccgcactccggctcgcaagccaaccaagccgtgtacgcttccgttttaaaaccaggcgacaccattttgggtatgtctctggcgcacggcggccacctgacccacggcgcgagcgttaatatctcaggcaaactctacaatgccgttacttatggtttggatgaaaacgaagtgctcgattatgccgaagtcgaacgcctcgcgctcgaacacaaacccaaaatgattgtggcgggtgcgtctgcctacgcgttgcaaatcgactgggcaaaattccgcgaaatcgccgataaagtcggcgcatacctctttgtcgacatggcgcactacgccggactgattgccggtggcgaatatcccaacccggtgccattctgcgacttcgttaccaccaccacccacaaaaccctgcgcggtcctcgcggcggcgtaattttgtgccgcgacaatacccacgaaaaagcgttgaactcttccatcttcccaagcctgcaaggcggcccgctgatgcacgttatcgccgccaaagccgtggcgtttaaagaagcattgcaacccgagttcaaacaatacgcaaaacaagtgaaaatcaatgcagccgccatggcggaagagttggttaaacgcggtttgcgcatcgtttccggccgcaccgaaagccacgttttcctcgtcgacctgcaaccgatgaaaatcaccggtaaagccgccgaagccgctttgggcaaagcgcacatcaccgtcaacaaaaacgccatcccgaacgatccggaaaaacccttcgttacctccggcatccgcatcggctccgctgccatgaccacacgcggttttaacgaagccgacgcgcgcgtattggcgaacttggttgccgacgtattgtctaaccccgaagacgaagccaacctcgccaaagtccgcgaacaagtaactgctttgtgcaataaatacaccgtttacggcgcgtaa

SEQ ID NO: 69846 - DNA, 435 bp, Neisseria meningitidis; identical to SEQ ID NO: 61452

SEQ ID NO: 69847 - DNA, 729 bp, Neisseria meningitidis; identical to SEQ ID NO: 55372

SEQ ID NO: 69848 - DNA, 1287 bp, Neisseria meningitidis; identical to SEQ ID NO: 54510

SEQ ID NO: 69849 - DNA, 843 bp, Neisseria meningitidis; identical to SEQ ID NO: 55301

SEQ ID NO: 69850 - DNA, 342 bp, Neisseria meningitidis; identical to SEQ ID NO: 60440

SEQ ID NO: 69851 - DNA, 1548 bp, Neisseria meningitidis; identical to SEQ ID NO: 61344

SEQ ID NO: 69852 - DNA, 1437 bp, Neisseria meningitidis; identical to SEQ ID NO: 61959

SEQ ID NO: 69853 - DNA, 600 bp, Neisseria meningitidis; identical to SEQ ID NO: 38221

SEQ ID NO: 69854 - DNA, 561 bp, Neisseria meningitidis; identical to SEQ ID NO: 61841

SEQ ID NO: 69855 - DNA, 603 bp, Neisseria meningitidis; identical to SEQ ID NO: 55351

SEQ ID NO: 69856 - DNA, 357 bp, Neisseria meningitidis; identical to SEQ ID NO: 55054

SEQ ID NO: 69857 - DNA, 198 bp, Neisseria meningitidis; identical to SEQ ID NO: 39472

SEQ ID NO: 69858 - DNA, 336 bp, Neisseria meningitidis; identical to SEQ ID NO: 45775

SEQ ID NO: 69859 - DNA, 1686 bp, Neisseria meningitidis
atgtctatggaaaattttgctcagctgttggaagaaagctttaccctgcaagaaatgaacccgggtgaggtgattaccgctgaagtagtggcaatcgaccaaaacttcgttaccgtaaacgcaggtctgaaatcagaatccctgattgatgtagctgaattcaaaaacgctcaaggcgaaattgaagttaaagtcggcgacttcgttaccgttaccatcgaatccgtcgaaaacggcttcggcgaaaccaaactgtcccgcgaaaaagccaaacgcgctgccgattggattgccctggaagaagccatggaaaacggcgacatcctgtccggcatcatcaacggaaaagtcaaaggcggcctgaccgttatgattagcagcatccgcgcattcctgccgggttctttggtcgacgtacgtcctgtaaaagacacttctcacttcgaaggcaaagagatcgaattcaaagtgatcaaactggacaaaaaacgcaacaacgtcgttgtttcccgccgcgccgttctggaagccactttgggtgaagaacgcaaagccctgctggaaaacctgcaagaaggctccgtcatcaaaggcatcgttaaaaacattaccgattacggtgcattcgttgacttgggcggcatcgacggtctgttgcacatcaccgatttggcatggcggcgcgtgaaacacccgagtgaagtcttggaagtcggtcaggaagttgaagccaaagtattgaaattcgaccaagaaaaacaacgcgtttccttgggtatgaaacaactgggcgaagatccttggagcggtctgacccgccgttatcctcaaggcacccgcctgttcggcaaagtatccaacctgaccgactacggcgcattcgtcgaaatcgaacaaggcatcgaaggtttggtacacgtctccgaaatggactggaccaacaaaaacgtacacccgagcaaagtcgtacaactgggcgacgaagtcgaagtcatgattttggaaatcgacgaaggccgccgccgtatctctttgggtatgaaacaatgccaagccaatccttgggaagaatttgccgccaaccacaacaaaggcgacaaaatctccggcgcggttaaatccattaccgatttcggcgtattcgtcggcctgcccggcggcatcgacggtttggttcacctgtccgacctgtcctggaccgaatccggcgaagaagccgtacgcaaatacaaaaaaggcgaagaagtcgaagccgtcgtattggcaatcgacgtggaaaaagaacgcatctccttgggtatcaaacaactggaaggcgatccgttcggcaacttcatcagcgtgaacgacaaaggttctttggttaaaggttccgtgaaatctgttgacgccaaaggtgctgttatcgccctgtctgacgaagtagaaggctacctgcctgcttccgaatttgcagccgaccgcgttgaagatttgaccaccaaactgaaagaaggcgacgaagttgaagccgtcatcgttaccgttgaccgcaaaaaccgcagcatcaaactttccgttaaagccaaagatgccaaagaaagccgcgaagcactgaactccgtcaatgccgccgccaatgcgaatgccggcaccaccagcttgggcgacctgctgaaagccaaactctccggcgaacaagaataa

SEQ ID NO: 69860 - DNA, 573 bp, Neisseria meningitidis; identical to SEQ ID NO: 61590

SEQ ID NO: 69861 - DNA, 993 bp, Neisseria meningitidis; identical to SEQ ID NO: 61036

SEQ ID NO: 69862 - DNA, 279 bp, Neisseria meningitidis; identical to SEQ ID NO: 37465

SEQ ID NO: 69863 - DNA, 267 bp, Neisseria meningitidis; identical to SEQ ID NO: 42326

SEQ ID NO: 69864 - DNA, 1266 bp, Neisseria meningitidis; identical to SEQ ID NO: 55965

SEQ ID NO: 69865 - DNA, 1500 bp, Neisseria meningitidis; identical to SEQ ID NO: 61584

SEQ ID NO: 69866 - DNA, 447 bp, Neisseria meningitidis
atgcagcacgaagaaggcaaccgccaacgccctcaaggcgaactgctcctgcgtaccgtcgctatgccgcgcgataccaatcccaaccaagacattttcggcggctggattatgtcgcagatggatttgggcggcggcatattggcggcggaaatcgcgcggggacgcatcgttaccgtcgccgttcaggaaatgaacttcatccgcccggtcaaggtcggcaacgtcgtctgctgctacgggcattgcgtccgcgtgggcaatacttccctccagcttaaagtcgaagtctgggtgaaaactttgatgaacgattgcgttaccgaagaccgccacctcgtaaccgaagccgtgttcacttatgtcgccatcgatgcggaaggtaatccgcgcccgattccgaaagaaggcaaccccaaattggcgggcttattgcctactccgtaa

SEQ ID NO: 69867 - DNA, 3486 bp, Neisseria meningitidis
atgcgcctgacccacatcaaactctccggcttcaaatcttttaccgacccgaccacgattcatgttccggggcagcttgttgcggttatcgggccgaacggctgcggcaagtcgaatgtgattgacgcggtgcgctgggtgttgggcgaggcttcggcgaagcagcttcgtggcgagagtatgcaggacgtgatttttaacggtgcggcgacgcgccgtcctgcgccgagggcttcggtggagctggtgtttgacaacagcgaccacagtttgcagggggcgtgggggcagtatgccgaggtgagtatcaagcggcagctgacgcgtcagggcgaatcgacttatttcatcaataatcagaccgtgcgccgccgcgacattaccgatttatttttgggtacgggcgtgggcgcgcgcggttatgccgttatcgagcaggggatgatttcgcgcatcatcgaagcgcggccggaggaattgcgcgcctatatcgaggaggcggcaggtgtgtccaaatataaggaacgccgcaaggagacggaaggccgtctgaaagacacgcgcgagcatttgcagcgtttgggcgatttgcagaacgaattggcgcgtcaggtggaaaagctggagaaacaggcggaaaccgccgaacgctacaaatccctgaccgcgcagttgaaccggcaacaggatttgctcgattacgcccaatggcagcaatcgcttgccgccgccgacaaggcgaccgagcagcatcagtctttgcaggcgcagcaggacgaaaccgccgcgcaggttcaggcgttaaacgacgaagtacacgccttgcagaccgccgaacagtcgcagcaacaggcggtgcatgaattgagcaacaaacgcggcgtgttgcgcgagcagattgcccgtttggaagaacaaatccgccatcagcaaaacctgcaccaacgcatcgaacgcgacaagcaggcggcgcaggcgcagttgcagcgtattcatcaagagcagcagcaaatccgcgtgcagcttgaagaaaacgagttatacgtcgaagaaaagcaaaccgagctggcggagtgggcgatgcaggttgccgaacacgaagagcgtctgcccgaattggaagaaacccaaaccgcgctcaatgccgccttccaaacccagcaggacgaggcaaaccgcatccgccgcgaactggcgttgaagcagcagcagcttgcccatgccgaacaaaccgttgccaagcacgaagagcgcaaaggccgtctgaaacaggagaaccaagccctgaacctgcccgacgaagcggaaaccgccgccgcgcaggaggccgctgccttgttgcaaagccggcaagagcattacgaagaacaaatcatcgccgccgaagaagccttacacgccgcccgcgaggcgtttcagacggcctcaaaccgcttccaaagcctgaagcagcaacacatcaccttgcaggcgcagcagcaggcgttgtcgcaaatcctgtcgcaacagcaggaagcagccgatttctggcaggcaaccggccacgccgccgcgccgcaactgtggcaacacattaccgcgcctgctgagtggcagcacgccctgtccgtcatccttgccgaacgcctgcacgcccgcgacgtgccgcaaggtttcgtaccgcccgaacctttgccgcaggggcaggcggcgtggctttcagacggtctctccggcggcatcaaaaaatccctgcccgtacaggcattgctgaaccaaatccaagcgcagccgccgtttcagacggcattgcaccactggctcgacggcgtattgtgtgcgcctgatttgagttacgccctcgcgcatcaaaacgatttgggcgcacatcaaatctggctcacgcccgaaggccatcaggtcgataaggtcagcgtcctgctctatgccaaacccgcgcaggaaagcctgattgcccaaaaagcgcgcctcgacggcatcgcgtccgaactggaaaacctctcccccgaactttctgccgccgaagccgcgttcaaacaggcggaagccgccgtgcgctcgtccgaagtgcagcataaaaacctgatgcagcagcaacagcagcacacgcgccaatacagccaagcgcagcaacgcgccgccgaacttctggcgcgtaccaaccaagggcaaatccgccgcgaacacatcgagcgcgaactggcgcagttggcggaagagcagaccgtgttgcaacacgcgtccgacgggctttcagacgacattgctactttgcaggaagccgccgccgaactcgaacaccagcagcaaaccgccgcacacagccgccaagagcagcaaggccgtctgaaacaggcgcagcttgccctgctggaagccaaccgccaatatgggcttgccgaagtcgccgtccacaaactcaaccagcaaaaacaaaactaccagcagcaaatcgcccgactcgaacagcaaaccctagactggcaggaacgccagcaagagcttgtcctcgcctatgaaaccgagttccaaaacgacgagcagcacatcaagctcgacgagctgaccgaatccgtacacacgctggacgaagaatacatcgccgtgcaggaaaaactcacgcagattcaggagcagggtagggaacaatacgcccgcgtacaaaccctgcaaacccagttgccacagcttcaggccgccacccaaaccgccctgttgcaacaacaggaagccctgatcaacgccaaacgctaccatcaaaacctgaccgaacgcgccgccgatttggatgcgctcgaagcgttggcgaaagaatcgccgaaagtattgaacagcagcatcggcagcctctcgcaacaaatcgaagccctcggcgcggtcaacctcgccgccctgcaagaactcgaagaagcgcgcgaacgcgacggctactaccgcagccaaagcgaagacgtgcagaccgccatcacccttttggaagaagccatcgcccaaatcgacgacaaaaccaaagcgcgtttcaaagaaaccttcgacgccgtcaacggcaaagtccaaaccttcttcccgaccctgttcggcggcggcgaagccaccctcaaaatgataggcgacgaccttttgaccgccggcgtgtctatcatggcgcgcccgcccggcaagaaaaacagcaccatccacctcctttccggcggcgaaaaagcccttaccgcgatgagcctcgtgttcgccctgttcagcctcaaccccgctccgttctgtcttttggacgaagtcgacgctccgctagacgatgccaacacttcgcgtttctgcaacctggtcaaagaaatgtcggcgcaaacccagtttctctacatctcccacaaccgcctgaccatggaaatggcggaacagctggtcggtgtaaccatgcaggaaaaaggcgtatcgcgcgtcgtcgccgtggacatcaaacaggcgttggaaatggcggaatccgtttga

SEQ ID NO: 69868 - DNA, 1188 bp, Neisseria meningitidis; identical to SEQ ID NO: 55791

SEQ ID NO: 69869 - DNA, 1488 bp, Neisseria meningitidis; identical to SEQ ID NO: 61321

SEQ ID NO: 69870 - DNA, 183 bp, Neisseria meningitidis; identical to SEQ ID NO: 38466

SEQ ID NO: 69871 - DNA, 987 bp, Neisseria meningitidis; identical to SEQ ID NO: 40869

SEQ ID NO: 69872 - DNA, 261 bp, Neisseria meningitidis
ttggaaatgtttgatggcgaagtagaagcagatgaaagttattttggcggacaacgcaaaggcaaacgcggtcgcggtgctgccggtaaagtcgccgtattcggtcttttgaagcgaaatggtaaggtttatacggttacagtaccgaatactcaaaccgctactttatttcctattatccgtgaacaagtgaaacctgacagcattgtttatacggattgttatcgtagctatgatgtaattagatgtgagcgaatttag

SEQ ID NO: 69873 - DNA, 924 bp, Neisseria meningitidis
atgctgcaaagaactttggcgaaatccatcagcgttaccggagtcgggctgcattcgggcgaacgcgtcgcgctgaccctgcaccccgcgcctgaaaacagcgggatttccttccgccgtaccgatttggacggcgagatgggcgaacaaatcaagctgaccccttatttgatcaacgatacccgcctttcctccaccatcgttaccgacaaaggcgtgcgcgtcggcacgatcgaacacattatgtccgcgctgtccgcctacggtatcgacaacgcgctgattgagctgaacgcgcccgaaatcccgattatggacggctccagcctgccgtttatttaccttttgcaagatgcgggcgtggtcgatcaaaaggcgcaaaagcgttttttgaaaatcctcaagcctgtcgaaatcaaagaagcgggcaaatgggtgcgctttacgccgtatgacggctttaaggtaacgctgaccatcgaattcgaccatccggttttcaaccgcagctcgcccacttttgaaattgatttcgccggcaaatcctacatcgacgaaatcgcgcgcgcgcgcactttcggctttatgcacgaagtggaaatgatgcgcgcccacaatctgggtttgggcggcaatttgaacaacgctatcgtgattgacgacacggatgtcctgaatcctgaaggcttgcgctatcccgatgagtttgtgcgccacaaaatccttgatgccatcggtgatttgtatatcgtcggacatccgattgtcggcgcgtttgaaggctacaaatcgggacacgccatcaacaacgcactcttgcgcgcggttttggcagacgaaacggcttacgaccgggtggaatttgccgacagcgatgatttgcccgacgcatttcacgagctgaacatcagaacttgtggataa

SEQ ID NO: 69874 - DNA, 654 bp, Neisseria meningitidis; identical to SEQ ID NO: 54860

SEQ ID NO: 69875 - DNA, 1065 bp, Neisseria meningitidis
atggcactcgtatccatgcgccaactgcttgatcatgctgccgaaaacagctacggcctgcccgcgttcaacgtcaacaacctcgaacaaatgcgcgccattatggaagccgccgaccaagtcaacgcgcccgtcatcgtacaggcgagtgcaggtgcgcgcaaatatgcgggcgcgccgtttttgcgccacctgattctggcggctgtcgaagaatttccgcacatccccgtcgtgatgcaccaagaccacggcgcatcgcccgacgtgtgccaacgctccatccaactgggcttttcctccgtgatgatggacggctcgctgatggaagacggcaaaaccccttcttcttatgaatacaacgtcaacgccacccgtaccgtggttaatttctcccacgcttgcggcgtatccgtcgaaggcgaaatcggcgtgttgggcaacctcgaaactggcgaagccggcgaagaagacggtgtaggcgcagtgggcaaactttcccacgaccaaatgctcaccagcgtcgaagatgccgtgcgtttcgttaaagataccggcgttgacgcattggcgattgccgtcggcaccagccacggcgcgtacaaattcacccgtccgcccacaggcgacgtgttgcgtatcgaccgcatcaaagaaatccaccaagccctgcccaatacacacatcgtgatgcacggttccagctccgttccgcaagaatggctgaaagtcatcaacgaatacggcggcaatatcggcgaaacctacggcgtgccggttgaagaaatcgtcgaaggcatcaaacacggcgtgcgcaaagtcaacatcgataccgacttgcgccttgcttccaccggcgcggtacgccgctaccttgccgaaaacccgtccgacttcgatccgcgcaaatatttgagcaaaaccattgaagcgatgaagcaaatctgcctcgaccgttatcttgcgttcggctgcgaaggtcaggcaggcaaaatcaaaccggtttccttggaaaaaatggcaaaccgttatgccaagggcgaattgaaccaaatcgtcaaataa

SEQ ID NO: 69876 - DNA, 300 bp, Neisseria meningitidis; identical to SEQ ID NO: 39866

SEQ ID NO: 69877 - DNA, 1815 bp, Neisseria meningitidis
atgcccgctgaaacgaccgtatccggcgcgcaccccgccgccaaactgccgatttacatcctgccctgcttcctttggataggcatcgtcccctttaccttcgcgctcaaactgaaaccgtcgcccgacttttaccacgatgccgccgccgcagccggactgattgtcctgttgttcctcacggcaggaaaaaaactgtttgatgtcaaaatcccacctatcagcttccttctgtttgcaatggcggcgttttggtatcttcaggcacgcctgatgaacctgatttaccccggtatgaacgacatcgtctcttggattttcatcttgctcgccgtcagcgcgtgggcctgcaagagtttggtcgcacacttcggacaagaacgcatcgtgaccctgtttgcctggtcgctgcttatcgactccctgcttcaatcctgcatcgtcgtcatccagtttgccggctgggaagacacccccctgcttcaaaacatcatcgtttacagcgggcaaggcgtaatcggacacatcgggcagcgcaacaacctcggacactacctcatgtggggcatactcgccgccgcctacctcaacggacaacgaaaaatccccgccgccctcggcgcaatctgcctgattatgcagaccgccgttttaggtttggtcaattcgcgcaccatcttgacctacatagccgccatcgccctcatccttcccttctggtatttccgttcggacaaatccaacaggcggacgatgctcggcatagccgcagccgtattccttaccgcgctgttccaattttccatgaacaccattctggaaacctttactggcatccgctacgaaactgccgtcgaacgcgtcgccaacggcggtttcacagacttgccgcgccaaatcgaatggaataaagcccttgccgccttccagtccgccccgatattcgggcacggctggaacagttttgcccaacaaaccttcctcatcaatgccgaacagcacaacatacacgacaacctcctcagcaacttgttcacccattcccacaacatcgtcctccaactccttgcagagatgggaatcagcggcacgcttctggttgccgcaaccctgctgacgggcattgccgggctgctgaaacgccccctgacccctgcatcgcttttcctgatctgcacgcttgccgtcagtatgtgccacagtatgctcgaatatcctttgtggtatgtctatttcctcatccctttcggactgatgctcttcctgtcccccgcagaggcttcagacggcatcgccttcaaaaaagccgccaatctcggcatactgaccgcctccgccgccatattcgcaggattgttgcacttggactggacatacacccggctggttaacgccttttcccccgccactgacgacagtgccaaaaccctcaaccggaaaatcaacgagttgcgctatatttccgcaaacagtccgatgctgtccttttatgccgacttctccctcgtaaacttcgccctgccggaataccccgaaacccagacttgggcggaagaagcaaccctcaaatcactaaaataccgcccccactccgccacctaccgcatcgccctctacctgatgcggcaaggcaaagttgcagaagcaaaacaatggatgcgggcgacacagtcctattacccctacctgatgccccgatacgccgacgaaatccgcaaactgcccgtatgggcgccgctgctacccgaactgctcaaagactgcaaagccttcgccgccgcgcccggtcatccggaagcaaaaccctgcaaatga

SEQ ID NO: 69878 - DNA, 687 bp, Neisseria meningitidis; identical to SEQ ID NO: 36558

SEQ ID NO: 69879 - DNA, 966 bp, Neisseria meningitidis; identical to SEQ ID NO: 44673

SEQ ID NO: 69880 - DNA, 1005 bp, Neisseria meningitidis; identical to SEQ ID NO: 36487

SEQ ID NO: 69881 - DNA, 1245 bp, Neisseria meningitidis; identical to SEQ ID NO: 54870

SEQ ID NO: 69882 - DNA, 729 bp, Neisseria meningitidis; identical to SEQ ID NO: 55291

SEQ ID NO: 69883 - DNA, 894 bp, Neisseria meningitidis; identical to SEQ ID NO: 54767

SEQ ID NO: 69884 - DNA, 2016 bp, Neisseria meningitidis; identical to SEQ ID NO: 55026

SEQ ID NO: 69885 - DNA, 426 bp, Neisseria meningitidis; identical to SEQ ID NO: 61799

SEQ ID NO: 69886 - DNA, 474 bp, Neisseria meningitidis; identical to SEQ ID NO: 60630

SEQ ID NO: 69887 - DNA, 537 bp, Neisseria meningitidis; identical to SEQ ID NO: 60600

SEQ ID NO: 69888 - DNA, 435 bp, Neisseria meningitidis; identical to SEQ ID NO: 55732

SEQ ID NO: 69889 - DNA, 933 bp, Neisseria meningitidis; identical to SEQ ID NO: 38763

SEQ ID NO: 69890 - DNA, 546 bp, Neisseria meningitidis; identical to SEQ ID NO: 56103

SEQ ID NO: 69891 - DNA, 729 bp, Neisseria meningitidis; identical to SEQ ID NO: 38455

SEQ ID NO: 69892 - DNA, 1284 bp, Neisseria meningitidis; identical to SEQ ID NO: 60668

SEQ ID NO: 69893 - DNA, 1008 bp, Neisseria meningitidis; identical to SEQ ID NO: 55419

SEQ ID NO: 69894 - DNA, 291 bp, Neisseria meningitidis; identical to SEQ ID NO: 55020

SEQ ID NO: 69895 - DNA, 618 bp, Neisseria meningitidis; identical to SEQ ID NO: 61485

SEQ ID NO: 69896 - DNA, 474 bp, Neisseria meningitidis; identical to SEQ ID NO: 61030

SEQ ID NO: 69897 - DNA, 405 bp, Neisseria meningitidis
atgaatctcgtgaaactgctggcgaataactggcagccgattgccatcatcgcgcttgtcggcacgggtttggcggtgtcacaccatcaaggctacaaggcagcctttgcgaagcagcaggcggtcatcgacaagatggagcacgataaggcgcaagccctgctgttgtcggctcaaaactatgcgcgcgaactggaactggcacgcgcggaagcgaaaaaatatgaagtcaaggcgcacgctgtcggcatggctttggcgaaaaaacaggcggaagtcagccgtctgaaaacggaaagagacctttgcaaaattcctgtccctcccgacagccgaaacccaaacacaggatttcggctgttttcgtaccaaatacctcctaattttacccaaatatccccttaa

SEQ ID NO: 69898 - DNA, 438 bp, Neisseria meningitidis; identical to SEQ ID NO: 56083

SEQ ID NO: 69899 - DNA, 1134 bp, Neisseria meningitidis; identical to SEQ ID NO: 49200

SEQ ID NO: 69900 - DNA, 528 bp, Neisseria meningitidis; identical to SEQ ID NO: 54496

SEQ ID NO: 69901 - DNA, 606 bp, Neisseria meningitidis
atgacccgtcaatctctgcaacaggctgccgaaagccgccgttccatttattcgttaaataaaaatctgcccgtcggcaaagatgaagttgtccaaatcgtcgaacacgccgttttgcacacaccttcttcgttcaattcccaatctgcccgcgtggtcgtgctgtttggcgaagagcatgataaggtgtggcaatttgtcgaagacgcgctgcgtgccgtcgtgcctgccgacagttttgaaccgaccgcgcaaaaattgaacctgtttaaggcgggtgcggcaactattttgttttatgaagatcaaaatgttgtcaaaggtttgcaggagcagttccctgcttatgccgccaactttcccgtttgggcggaccaggcgaacgctatggtgcagtatgccgtttggacgacacttgccgcggtcggcgtaggtgcaaacctgcaacattacaatcccttgcccgatgcggcgattgccaaagcgtggaatatccccgaaaactggttgttgcgcgcacaaatggttatcggcggtattgaaggggcggcaggtgaaaagacctttgaacccgttgcagaacgtttgaaagtgttcggcgcataa

SEQ ID NO: 69902 - DNA, 291 bp, Neisseria meningitidis; identical to SEQ ID NO: 42259

SEQ ID NO: 69903 - DNA, 843 bp, Neisseria meningitidis
atgtgtcaactgctgggcatgaactgcaatacgccgaccgatattatgttttcctttgaaggcttccgccggcgcggcggcattaccgaccatcatgccgacggtttcggcatcggctttttcgaaggcaaaggcgtgcgcctgttccatgacgacaaacccagtgccaattcgcccgtcgccgacctcgtgcgcgcctaccagattaaatcggaaaacgtcgtcgcccatatccgcaaagcatcgcaaggacaaacctcgctggcgaacacccatccctttatgcgcgaaatgtggggtggctactggctgtttgcccacaacgggcatttgattgattttttccccgaacagggcgaatttttccaccccgtcggcacaaccgattccgaacgcgcgttctgccacatcctcaaccgcctgcgcacccgctttgccgcccgtcccgacgacgacacgctgtttgacgcgattgcggggctgacgcacgaaatccgcaagttcgggctgtttaactttatgctttcagacggcattgccctgtttgcccacgccagcacactgctgcactacatcgtccgccaagccccgttcggcaaggcgcgcctgctcgacgacgacgtgatggtcgattttgccgaagtaaccacgccctccgaccgcgtcgccgttatcgccaccctgccgctgacccgcgacgaatcatggtcccaacttgccgtggacgaactggtcatgttccgcgaaggcaacatcgtccgacacgaccgtcccgaaaaccccgtttatatgagtgtcgaagaaggtttggaaaccgcgcgcgccgccggcgtcgccgtctga

SEQ ID NO: 69904 - DNA, 561 bp, Neisseria meningitidis; identical to SEQ ID NO: 61791

SEQ ID NO: 69905 - DNA, 813 bp, Neisseria meningitidis; identical to SEQ ID NO: 60842

SEQ ID NO: 69906 - DNA, 1422 bp, Neisseria meningitidis; identical to SEQ ID NO: 55200

SEQ ID NO: 69907 - DNA, 318 bp, Neisseria meningitidis; identical to SEQ ID NO: 62194

SEQ ID NO: 69908 - DNA, 198 bp, Neisseria meningitidis; identical to SEQ ID NO: 46539

SEQ ID NO: 69909 - DNA, 186 bp, Neisseria meningitidis; identical to SEQ ID NO: 55510

SEQ ID NO: 69910 - DNA, 768 bp, Neisseria meningitidis
atggcactggcaaaacgcatcatcccctgtctcgacgtaaaagacgggcgcgtcgtcaaaggcgtgaacttcatcggtttgcgcgacgcgggcgaccccgtcgaagccgccaaacgctacaacggcgaaggcgcggacgaattgaccttcctcgacatcaccgcctcatccgacaaccgggataccatcctgcacatcatcgaagaagttgccggacaagtcttcatcccgctgaccgtcggcggcggcgtacgcaccgttgccgacatccgccgcctgctcaatgccggcgcggacaaagtcagcatcaacaccgccgccgttacccgtcccgacctgattgacgaagccgccggatttttcggttcgcaagccatcgtcgccgccgtcgatgccaaagccgtcaaccccgaaaacacacgctgggaaatctttacccacggcgggcgcaatccgaccggtttggatgcggtggaatgggcgatcgaaatgcaaaaacgcggcgcgggcgaaatcctgcttaccggtatggacagggacggtacgaaacagggtttcaacctgccgctgacccgcgccgttgccgaagccgtcgacatccccgtcatcgcctccggcggggtcggcaatgtccggcacctgattgaaggcataaccgaaggcaaagccgatgccgtacttgccgccggcgttttccatttcggggaaatcgccatccgcgaagccaaacgcgctatgcgcgaagccggcatcgaagtgcgcctctga

SEQ ID NO: 69911 - DNA, 726 bp, Neisseria meningitidis; identical to SEQ ID NO: 55384

SEQ ID NO: 69912 - DNA, 1170 bp, Neisseria meningitidis
atggacaatgaattgtggattatcctgctgccgattatccttttgcccgttttcttcgcgatgggctggtttgccgcccgcgtggatatgaagactgtattaaagcaggcaaaaagcataccgtcgggattttataaaagtctggatgccttggttgaccgcaacagcggacgtgccgccagggaattggcagaggtcatcgatcagcagcctcagtcatacgacctgaacctcaccctaggcaagctttaccgtcagcgtggcgaaaacgacaaagccatcaatatgcaccaaacattgcttgactctcccgatacaaccggagccaagcgtgcgcgcgtattatttgaattggcgcaaaactatcaaagtgcggggttggttgaccgtgccgaacagatttttttggggctgcaagacggtgaaatggcgcgtgaagccagacagcacctgctcaatatctaccaacaggacagggattgggaaaaagcggttgaaaccgcccggctgctcagccatgacgagcagacctatcagtttgagattgcacagttctattgcgaacttgcccaagccgcgctgttcaagtccaatttcgatgccgcgcgtttcaatgtcggcaaggcactcgaagccaacaaaaaatgcacccgcgccaacatgattttgggcgacatcgaacaccgacaaggcaatttccctgccgccgtcgaagcctatgccgccatcgagcagcaaaaccatgcatacttgagcatggtcggcgagaagctttacgaagcctatgccgcgcagggaaaacctgaagaaggcttgaaccgtctgacaggatatatgcagacgtttcccgaacttgacctgatcaatgtcgtgtacgagaaatccctgctgcttaagggcgagaaagaagccgcgcaaaccgccgtcgagcttgtccgccgcaagcccgaccttaacggcgtgtaccgcctgctcggtttgaaactcagcgatatgaatccggcttggaaagccgatgccgacatgatgcgttcggttatcggacggcagctacagcgcagcgtgatgtaccgttgccgcaactgccacttcaaatcccaagtctttttctggcactgccccgcctgcaacaaatggcagacgtttaccccgaataaaatcgaagtttaa

SEQ ID NO: 69913 - DNA, 369 bp, Neisseria meningitidis; identical to SEQ ID NO: 38525

SEQ ID NO: 69914 - DNA, 702 bp, Neisseria meningitidis
atgacggaacctgcggccgaaggcggtaaagctgccaaggcgttaaaaaaatatctgattacgggcattttggtttggctgccgattgcggtaacggtttgggtggtttcctatatcgtttccgcgtccgatcagctcgtcaacctgctgccgaagcaatggcggccgcaatatgttttggggtttaatatcccggggctgggcgttatcgttgccattgccgtattgtttgtaaccggattgtttgccgcaaacgtattgggccggcagattcttgccgcgtgggacagcttgttggggcggattccggttgtgaagtccatctattcgagtgtgaaaaaagtatccgaatcgttgctgtccgacagcagccgttcgtttaaaacaccagtactcgtgccgtttccccaatcgggtatttggacaatcgcattcgtgtccggtcaggtgtcgaatgcggttaaggccgcattgccgaaggacggcgattatctttccgtgtatgttccgaccacgccgaatccgaccggcggttactatattatggtaaagaaaagcgatgtgcgcgaactcgatatgagcgtggacgaagcgttgaaatatgtgatttcgctgggtatggtcatccctgacgacctgcccgtcaaaacattggcaggacctatgccgtctgaaaaggcggatttgcccgaacaacaataa

SEQ ID NO: 69915 - DNA, 1143 bp, Neisseria meningitidis; identical to SEQ ID NO: 39162

SEQ ID NO: 69916 - DNA, 717 bp, Neisseria meningitidis; identical to SEQ ID NO: 54670

SEQ ID NO: 69917 - DNA, 756 bp, Neisseria meningitidis
atggggcgtttacttttgggcagtatccgcatgagcatcattgtcgaaaacctgaccgtcagctaccgccgccgtcctgccgtacaccacgttgacattacttttgaagaacatagtatgtgggcggttttcggtcccaacggcgcagggaaatccacctttctcaaatccttgatgggattgcagcctatcgatacaggcagcatccggctggatggattgagccgccaagacatcgcctaccttccccagcagtccgatatcgaccgctcccaacctatgactgttttcgacttggcggcaatggggctttggtatgaaatcggctttttcaaagggataaataccgctcaaaaacaacgcgttcacgaagccttggagcgtgtaggaatgcggcagtttgcacgccgccaaatcgcccacctctcaaacggacaattccaacgcgtcctttttgcccgaatgctggttcaaaatgcaaaattcctgcttttggacgaacctttcaacgccgttgatgcacggacgacctacgaacttctcgacgtattgcagaaatgccattgcggcggacacgctatcattgccgtactgcacgattacgaacaagtccgtgcctactttcccagtaccctgctgctcgcccgagaaaaaattgcggcaggcgcaaccgagaccattctgacagaaccctacctcgcccaagccaacgccaaaatgcagcaacaggaaagccccgactggtgcgcctcataa

SEQ ID NO: 69918 - DNA, 1215 bp, Neisseria meningitidis; identical to SEQ ID NO: 36211

SEQ ID NO: 69919 - DNA, 1863 bp, Neisseria meningitidis; identical to SEQ ID NO: 60462

SEQ ID NO: 69920 - DNA, 1116 bp, Neisseria meningitidis; identical to SEQ ID NO: 60371

SEQ ID NO: 69921 - DNA, 1569 bp, Neisseria meningitidis
atgaaacaccgtactttcttttccctttgcgccaagttcggctgcctgcttgcgctgggtgcttgttcgcccaaaatcgtcgatgccggagccgcgaccgtgccgcacactttatccactttgaaaaccgcagacaaccgccccgccagtgtttacttgaaaaaagacaaaccgacgctgattaaattttgggcaagctggtgtcctttgtgtctgtccgaattgggacagaccgaaaaatgggcgcaagatgcaaaattcagctccgccaacctgattaccgtcgcgtctccgggctttttgcacgagaaaaaagacggcgacttccaaaaatggtatgccggtttgaattatcccaagctgcccgtcgtaaccgacaacggcggcaccatcgcccaaagcctgaatatcagcgtttacccctcgtgggcgttaatcggtaaagacggcgacgtgcagcgcatcgtcaaaggcagcatcaacgaagcgcaggcgttggcgttaatccgcgacccgaatgccgatttgggcagcttgaaacattcgttctacaaacccgacactcagaaaaaggattcaaaaatcatgaacacacgcaccatttacctcgccggcggctgcttctggggcttggaagcctatttccaacgcatcgacggcgtggttgacgcggtatccggctacgccaacggcaacacgaaaaatccgagctatgaagacgtgtcctaccgccatacgggccacgccgaaaccgtcaaagtgacctacgatgccgacaaactcagcctagacgacatcctgcaatatttcttccgcgtcgttgatccgaccagcctcaacaaacagggcaacgacaccggtacgcaataccgcagcggcgtgtactacaccgaccccgccgaaaaagccgtcatcgccgccgccctcaaacgcgagcagcaaaaataccaactgcccctcgttgttgaaaacgagccgctgaaaaacttctacgatgccgaggaataccatcaggactacttgattaaaaaccccaacggctactgccacatcgatatccgcaaagccgacgaaccgctgccgggcaaaaccaagaccgcaccgcaaggcaaaggcttcgacgcggcaacgtataaaaaaccgagtgacgccgaactcaaacgcaccctgaccgaagagcaataccaagttacccaaaacagcgcgaccgaatatgccttcagccacgaatacgaccatttgttcaaacccggcatttatgtggacgttgtcagcggcgaacctttgttcagctccgccgacaaatatgattccggctgcggctggccgagcttcacgcgcccgattgatgcaaaatccgttaccgaacacgatgatttcagctacaacatgcgccgcaccgaagtgcgcagccacgccgccgactcacacttggggcacgtcttccccgacggcccgcgcgacaaaggcggactgcgctactgcatcaacggcgcgagcttgaaattcatcccgctggaacaaatggacgcggcaggctacggcgcgttgaagagtaaagtgaaataa

SEQ ID NO: 69922 - DNA, 729 bp, Neisseria meningitidis; identical to SEQ ID NO: 60476

SEQ ID NO: 69923 - DNA, 1581 bp, Neisseria meningitidis
atggagccgataatggcaaaaaaggacaataaaactaaaatccaaaagcccgaggctgcattgcagacggatgcggctcaaattacggcgaccggtcgggttatcgccgagcatccgtccaattttattacgccgcaaaagatgcgcgccctcttcgaggacgcagaaagcggcgacatccgcgcccaacacgagcttttcgcggacattgaggagcgcgacagcgacatcgcggcaaatatggggacgcgcaaacgcgcgctgctgacgctcaactggcgcgtcgccccgccgcgaaatgcgacgcccgaagaagaaaagctgtccgaccaagcctacgaaatgatggacagcctgcctaccctcgaagacctgattatggatttgatggacgcggtagggcacggattttctgcgttggaggtcgagtgggtattttcagacggcctttacctgccccgaaactttatccaccgcccgcaaagctggttcaaatgggacaaagacgacgggctgctgctgcgtacccgcgaaaatccggaaggcgaagcgttgtggccgctgggctgggtcgttcatacccaaaaatcgcgcagcgtccggcaggcgcgcaacgggcttttccgctcgctttcctggctgtatatgttcaaacactacgccgtccacgattttgccgagtttttggagctgtacggcatgcccatccgtatcggcaaatacggcgcgggcgcaaccaaagaggaaaaaaacaccctgcttcgagcggtggcggaaatcggtcacaacgcggcaggcatcatgccagaaggtatggaaatcgagctgcacaacgctgcaagcggtacgacggcaaccagcaatccgtttttgcagatggccgattggtgcgaaaaatcggcggcgcggctgattttggggcaaacgctgaccagcggtgcggacggaaaatccagcaccaacgcgctgggcaatatccacaacgaggtacgccgcgatttgctggtgtcggacgcaaaacaggtggcgcaaaccatcacaagccaaatcatcggaccgttcctgcaaatcaactatccccatgccgacccaaaccgcgtgccgaaatttgaatttgacacgcgcgagccgaaagacatcgcggtctttgccgacgctatcccgaaactggtggatgtcggcgtacaaatccccgaaagctgggtgcgcgacaaactggtcattccagatgtgcaggagggtgaggctgtgttggtgcggcaggtaccggacaatccggtaaacagaactacattggcggctttatccgcccacaccgtaccatctaaggctacgggcaggcatcaggaaatattggacggcgcgttggatgacgcgctggttgagcccgatttcaattctcagctcaacccgatggtgcgtcaggcggttgccgcacttaatgcttgcaacagctacgaggaggcagatgccgcactgaatgcgctttatccgaatttggacaacgcgaaactgcgtacctatatgcagcaggccttgtttatcagcgatattttgggacaagaccatgcccgcgcctga

SEQ ID NO: 69924 - DNA, 876 bp, Neisseria meningitidis; identical to SEQ ID NO: 41604

SEQ ID NO: 69925 - DNA, 969 bp, Neisseria meningitidis; identical to SEQ ID NO: 61480

SEQ ID NO: 69926 - DNA, 2151 bp, Neisseria meningitidis
atgaacaatccattggtaaatcaggctgctatggtgctgccggtgtttttgttgagtgcttgtttgggcggaggcggcggcagtttcgatcttgattctgtcgataccgaagccccgcgtcccgcgccaaagtatcaagatgtttcttccgaaaagccgcaagcccaaaaagatcaaggcggatacggtttcgcgatgcgcttcaagcggcggttctggttgccgcggggaaaagaagacgaggttaaactgaaagagagtgattgggaggagacgggattacctgacgatcccaaaaacttacctaagcgacagaaatcggttattgatgaagtaaaaacagacgatggcagcaataatattcattcttccccttatctcatgcaatcaaaccatcaaaacggcagcactaatggcggtgcaaaccaaccaaaaaacgaagtaacagattataaagattttaaatatgtttattccggctggttttacaaacacgcgaaaagcgaaatcaaaagagaaaacgggtcaagcagtgcaaaatctggcgacgacggctatatcttttatcacggtgaaaaaccttcccgacaacttcccgcttctgaaaaagttatctacaaaggcgtatggcattttgtaaccgatactaaaaagggacaaaaatttaacgatattcttggaacctcaaaaggacaaggagataagtacagcggattttcgggcgatgatgatgaacaatattctaataaaaacgaatccatgctgaaagatggtcaagagggttatggttttacctcaaatttagaagtggatttcaataataaaaaattgacgggcaaactgatacgcaataatagagttacaaacgctactcctaacgataaatacaccacccaatactacagccttgatgcccaaataacaggcaaccgcttcaacggtaaggcgatagcgaccgacaaaccacaagcgaatgaaaccaagccacatccctttgtttccgactcgtcttctttgagcggcggctttttcggcccgaagggtgaggaattgggtttccgctttttgagcgacgataaaaaagttgcggttgtcggcagcgcgaaaaccaaagacaacaccgcaaatggcaatactgcggcggcttcaggcggcacaggtgcggcagcatcgggcggtgcggcggctatgccgtctgaaaacagtaagctgaccacggttttggatgcggttgaattgacactaaacgacaagaaaatcaaaaatctcgacaacttcagcaacgccgcccaactggttgtcgacggcattatgattccgctcctgcccaaggattccgaaagcgggaacaatcaagccaatcaaggtacaaatggcggaacagcctttacctacaaaacaacctacacgccgaaaagcgatgaaaaagacacccaagcaggtatggcggagaatggcaatccagccgcttcaaatacggcaggtgataccaatggcaaaacaaaaacctatgcagtcgaagtctgctgttccaacctcaattatctgaaatacgggttgctgacgcgcaaaactgccggcaacacgggggaaggcggcaacggcagcccaaccgccgccgcccaaacggcacagggcgcacaaagtatgttcctccaaggcgagcgcaccgatgaaaacaagattccaagcgagcaaaacgtcgtttatcgggggtcttggtacgggcatattgccaacggcacaagctggagcggcaatgcttccaatgcaacgagtggcaacagggcggactttaccgtgaattttggcgagaaaaaaattaccggcacgttaaccgctgaaaacaggcagcaggcaacctttaccattgagggaatgattcaggacaacggtttttccggtacggcgaaaactgctgacttaggttttgatctcgatcaaagcaataccaccggcacacctaaggcatatatcacagatgccaaggtgcagggcggtttttacgggcctaaagccgaagaaatgggtggatggtttgcttatccgggcgacagtcagacgcagccgtccgcttcggggtcaggcgcatcagccgccaacagcgcgaccgtggtattcggtgcgaaacgccaacagcttgtgcaataa

SEQ ID NO: 69927 - DNA, 423 bp, Neisseria meningitidis; identical to SEQ ID NO: 54238

SEQ ID NO: 69928 - DNA, 1635 bp, Neisseria meningitidis; identical to SEQ ID NO: 38936

SEQ ID NO: 69929 - DNA, 1179 bp, Neisseria meningitidis; identical to SEQ ID NO: 43491

SEQ ID NO: 69930 - DNA, 495 bp, Neisseria meningitidis; identical to SEQ ID NO: 45300

SEQ ID NO: 69931 - DNA, 1614 bp, Neisseria meningitidis; identical to SEQ ID NO: 68569

SEQ ID NO: 69932 - DNA, 1386 bp, Neisseria meningitidis; identical to SEQ ID NO: 46406

SEQ ID NO: 69933 - DNA, 1056 bp, Neisseria meningitidis; identical to SEQ ID NO: 60540

SEQ ID NO: 69934 - DNA, 438 bp, Neisseria meningitidis; identical to SEQ ID NO: 50946

SEQ ID NO: 69935 - DNA, 183 bp, Neisseria meningitidis; identical to SEQ ID NO: 61362

SEQ ID NO: 69936 - DNA, 687 bp, Neisseria meningitidis; identical to SEQ ID NO: 39393

SEQ ID NO: 69937 - DNA, 1851 bp, Neisseria meningitidis; identical to SEQ ID NO: 54364

SEQ ID NO: 69938 - DNA, 276 bp, Neisseria meningitidis; identical to SEQ ID NO: 38139

SEQ ID NO: 69939 - DNA, 1377 bp, Neisseria meningitidis; identical to SEQ ID NO: 61917

SEQ ID NO: 69940 - DNA, 879 bp, Neisseria meningitidis; identical to SEQ ID NO: 54365

SEQ ID NO: 69941 - DNA, 1296 bp, Neisseria meningitidis; identical to SEQ ID NO: 55228

SEQ ID NO: 69942 - DNA, 1407 bp, Neisseria meningitidis
atgaaactgttccaacgcatcttcgccacattttgcgcggttatcgtctgtgcaatctttgtggcgagtttttctttctggctggtgcagaacacccttgccgaaaaccagttcaaccaacgccgcaccatcgaaaccactttgatgggcagcatcatttccgcattccgggcacgcggggacgcgggtgcgcgcgaaatcctgacggaatggaaagacagccccgtctcatcgggcgtgtacgttatacagggcgacgagaaaaaagatatcctgaaccggtatatcgacagctataccatcgaacgcgcccggcttttcgccgccggacacccgcattccaacctcgtccatatcgaatacgaccgcttcggcgaagaatacctgttcttcaccaaagactgggacaaactccaagcccgccgcctgcccagccccctgttgatccccggcctgccgctcgccccgatttggcacgaactcatcatattgtccttcatcatcatcgtcggactgctgatggcgtacatcctcgccggcaacattgccaaacccatcagaatcttaggcaacggcatggacagggtggcaaacggagaacttgaaacccgtatctcccaacaggtcgacgaccgcgacgacgaattgtcccatcttgccatccaattcgacaaaatggtggaaaaactcgaaaaactcgttgccaaagaacgccacctgctccatcacgtctcccatgaaatgcgttctccccttgcgcgcatgcaggcaattgtcggactgattcaggcgcagccccaaaaacaggagcaatatctcaaacggctggaaggcgaactgacccgcatggatacgctggccggggaactgttaaccctgtcccgtctcgaaacttccaatatggctttggaaaaagaaagcctgaaactcctgcccttcctgggcaacctggtagaagacaatcaaagcattgcccagaaaaacggacaaacggttaccctgtctgccgacggaaaaatccccgaaaacacaaccatccttgccaacgaaagctacctgtaccgcgccttcgacaacgtcatccgcaacgccgtcaactacagtcccgaaggcagcaccatcctgatcaacatcggacaagaccacaaacactggataatcgacgttaccgacaacggccccggcgtggacgaaatgcagctcccgcacatcttcaccgctttctaccgtgcagactccagtgccaacaaacccggaacaggactggggcttgcattgacccaacatattattgaacagcactgcggcaaaatcatcgccgaaaacatcaaaccgaacggtctgcggatgcgctttatcctgcccaagaaaaaaaccggttccaaaacagaaaaaagtgcgaactga

SEQ ID NO: 69943 - DNA, 639 bp, Neisseria meningitidis; identical to SEQ ID NO: 36502

SEQ ID NO: 69944 - DNA, 201 bp, Neisseria meningitidis; identical to SEQ ID NO: 43357

SEQ ID NO: 69945 - DNA, 303 bp, Neisseria meningitidis; identical to SEQ ID NO: 60667

SEQ ID NO: 69946 - DNA, 552 bp, Neisseria meningitidis; identical to SEQ ID NO: 54657

SEQ ID NO: 69947 - DNA, 2940 bp, Neisseria meningitidis; identical to SEQ ID NO: 61028

SEQ ID NO: 69948 - DNA, 1155 bp, Neisseria meningitidis; identical to SEQ ID NO: 55455

SEQ ID NO: 69949 - DNA, 495 bp, Neisseria meningitidis
ttggctgaaggtcaaaaatcagccgtcaccgagtattacctgaatcacggcatatggccaaaaaacaatacttctgccggcgtggcatcctccgccaccgacatcaaaggcaaatatgttaaaagcgttgaagtcaaaaacggcgtcgttaccgccgaaatgaaatcaagcggcgtaaacaaagaaatccaaggcaaaaaactctccctgtgggccaagcgtcaagacggttcggtaaaatggttctgcggacagccggttacgcgcaccgccgccgacagcgacgacgtcgccgccgccaacggcaagaccgccgacaacatcaacaccaagcacctgccgtcaacctgctgcgacgcttcatctgccgtttgcatagaaacaccacgcgccgacttcaaacacttccaaaaaatcagccgtcacagagtattacctgaatcacggcatatggcccggcgacaacagttctgccggcgtggcaacctcctctga

SEQ ID NO: 69950 - DNA, 606 bp, Neisseria meningitidis; identical to SEQ ID NO: 41601

SEQ ID NO: 69951 - DNA, 1176 bp, Neisseria meningitidis
atgttgaacacttccctttccccgtggccctgcttcacccaagaagaagccgatgccgtttccaaagtcctcttgtccaacaaagtcaattactggacgggcagcgaatgccgcgaatttgaaaaagaatttgccgcctttgccggcacgcggtacgccgtcgccctttccaacggcacgctggcactcgatgccgcgctcaaagcaatcggcataggcgagggcgatgatgtggttgttacctcgcgcaccttcctcgcctccgcgtcctgcatcgtgaacgcgggcgcaaaccccgtgtttgccgacgtggatttgaacagccaaaacatcagcgcggaaaccgtcaaggctgtgctgaccccgaataccaaagcgattatcgtggttcaccttgccggtatgcctgccgaaatggacgacatcatggctttggcaaaagaacatgatttgtgggtaattgaagactgcgcccaagcgcacggcgcaaaatacaaaggcaaatccgtcggctctatcggacacgtcggcgcgtggtcgttctgccaagacaaaatcatgaccaccggcggcgaaggcggtatggttacgaccaacgacaaaaccctgtgggaaaaaatgtggtcgtacaaagaccacggcaaaagctacgatgccgtgtaccaccgcgaacacgcgcccggtttccgctggctgcacgaaagtttcggcacaaactggcgtatgatggaaatgcaggcggtcatcgggcgcatccagctcaaacgtatgccagaatggacggcgcgccgccgagaaaacgccgccaagctggcggaaagcctgggcaaattcaaaagcatccgcttgattgaagtcgccggctacatcgaacacgcgcaatacaagttttacgccttcgtcaaacccgaacacctcaaagacggctggacgcgcgaccgcatcgtcagcgaactgaacgcgcgcaaagtcccctgctatcaaggcagctgctcagaagtgtatttggaaaaagccttcgacaacacgccgtggcggcccaaagagcggctgaaaaacgccgtcgagttgggcgataccagcctgatgttcttggtgcacccgacgctgaccgacggcgaaatcgcattctgcaaaaaacacatcgaagccgtattgaccgaagccgcacgataa

SEQ ID NO: 69952 - DNA, 291 bp, Neisseria meningitidis
atgaccatccgtcctttacacgaccgcgtcgtcgtcaaacgcttggaagctgaagaaaaaaccgcatcgggtatcgttttgccgggtgcggccgccgaaaaacccgatatgggcgaagtcatcgccgtgggcgcgggcaaaatcggtaaagacggcgcgcaccgtccgctggatgtcaaagtcggcgacaaaatcatcttcggcaaatacagcggccaaaccgtcaaagccgacggcgaagagctgttggtgatgcgcgaagaagacatcttcggcatcgttgaaaaataa

SEQ ID NO: 69953 - DNA, 2307 bp, Neisseria meningitidis; identical to SEQ ID NO: 55754

SEQ ID NO: 69954 - DNA, 1134 bp, Neisseria meningitidis; identical to SEQ ID NO: 61674

SEQ ID NO: 69955 - DNA, 600 bp, Neisseria meningitidis; identical to SEQ ID NO: 41967

SEQ ID NO: 69956 - DNA, 207 bp, Neisseria meningitidis; identical to SEQ ID NO: 55670

SEQ ID NO: 69957 - DNA, 684 bp, Neisseria meningitidis; identical to SEQ ID NO: 50144

SEQ ID NO: 69958 - DNA, 1986 bp, Neisseria meningitidis; identical to SEQ ID NO: 62044

SEQ ID NO: 69959 - DNA, 780 bp, Neisseria meningitidis
atgttttttgtcctttcccctgcgaaaaaccttaacgaaaaagaccctgcccctgtcagcgagtttacccaacccgacctgctggcagagtccgacattctaatgcagcagttgcgcgagcttgcgccgcaacagattgccgaactgatgcacgtttccgacaaaattgccctcttaaacgcgcagcgcaatgcagaatggcacacgccgtttacgccggaaaacgccaaacaggcggtctttatgttcaacggcgatgtttacgaaggtatggatgcaaacacattggatattggacagatacgctatctgcaaaaccatgtccgcctgctgtccggtctgtacggtcttcttcgcccgttagacctgatacagccctatcgtttggaaatggggacggcatttgccaatttgcgcggcaagaatttgtatgagttttggggcgacatcattaccaaccttttaaatgacacgcttgcccaagcaggcagcaatacgcttgtcaaccttgcctcacaggaatatttcaagtctgtcaacacgaaaaaacttcgggcgcggctgattaccccgatatttaaagacgaaaaaaacggtaaatataaaatcatcagtttctatgccaagcgcgcgcgcggattaatggtgcgctatgcggtagaacatcatattaccgaccctgaaatgctgaaaaattttaattacgaaggctacgcattcaatgacgcggcttcaaatgaaagcgaatgggtttttatgcgttcggaacaaataaaatga

SEQ ID NO: 69960 - DNA, 204 bp, Neisseria meningitidis; identical to SEQ ID NO: 37144

SEQ ID NO: 69961 - DNA, 345 bp, Neisseria meningitidis; identical to SEQ ID NO: 42101

SEQ ID NO: 69962 - DNA, 588 bp, Neisseria meningitidis; identical to SEQ ID NO: 43205

SEQ ID NO: 69963 - DNA, 1212 bp, Neisseria meningitidis; identical to SEQ ID NO: 61744

SEQ ID NO: 69964 - DNA, 1392 bp, Neisseria meningitidis; identical to SEQ ID NO: 55953

SEQ ID NO: 69965 - DNA, 435 bp, Neisseria meningitidis; identical to SEQ ID NO: 40706

SEQ ID NO: 69966 - DNA, 279 bp, Neisseria meningitidis; identical to SEQ ID NO: 54981

SEQ ID NO: 69967 - DNA, 1476 bp, Neisseria meningitidis; identical to SEQ ID NO: 60823

SEQ ID NO: 69968 - DNA, 252 bp, Neisseria meningitidis
atgaaaccgatttattttattattttttcttttttattaactgcttgcgtggttaataatgatgattattttgctgaaccgcctacaccatacttaattaacgaacacggtttttatatgaataaaaaaggtgatttaattagagatagtcacggtaacgcaattaaaatgacagaagaaaataaacacaatttccccaaagaatccgctaatccttattacgaaaaatggataaaacaaaaacgaaaataa

SEQ ID NO: 69969 - DNA, 957 bp, Neisseria meningitidis; identical to SEQ ID NO: 54437

SEQ ID NO: 69970 - DNA, 567 bp, Neisseria meningitidis
atgctggttcatcccgaagctatgagtgtcggcgcgcttgccgacaaaatccgcaaaatcgaaaactggccgcaaaaaggcatcttattccacgacatcacgcccgtcctgcaaagcgcggaatacttccgacttttggttgatttattggtttaccgctatatggatcagaaaatcgacatcgttgccggtttggacgcgcgcggcttcattatcggcgcggcactcgcctaccagctcaacgtcggtttcgtccccatccgcaaaaaaggcaagctgccttttgaaaccgtatcgcaaagctacgcgctcgaatacggggaagctgcggtggaaatccacaccgatgccgtcaaacccggttcgcgcgtgctgctggtcgatgatttggttgccacgggcggcacaatgcttgccgggctggaactgatccgcaaactcggcggagaaattgtcgaagccgccgccattttggaatttaccgaccttcaaggcggcaagaatatccgtgcaagcggcgcgcccttatttaccctgcttcaaaacgaaggctgtatgaagggctga

SEQ ID NO: 69971 - DNA, 1497 bp, Neisseria meningitidis
atgtcgcttgccttggtttacagccgcgccttgagcggtatgaatgcgccgttggtcgaagtggaagcccaccttgccaacggcctgccgcatttcaacatcgtcgggctgcccgatacggaagtaaaggaaagtcgcgaccgcgtccgtgccgccattattcaaagcggttttgaattccccgccaaaaaaattaccgtcaacctcgcccccgccgacctgcccaaagagtcggggcgtttcgatttgccgattgcaattggcatccttgccgcatcggggcaggttgcacccgaaaaactggcggaatacgagtttgcgggggaattggcactgtcggggctgttgcgccccgtgcgtggcgcgttggcgatggcgtggcagggtatgcaggcaaaacgtgcatttgttttgcctgaagaaaacgcaggacaagccgccgtgatgcgcggcattaccgtttacggcgcgcgctctttgggcgaagtcgccgcccatttgaacggtatcgaacctttggtgcaaaccgactgtcaagttcctcagatgccgtctgaaaacaccaaattgctcgacctcgtcgatgtcaagggtcagcacactgcccgccttgctttggaaatcgctgccgcaggcggacacagccttttgatgatgggtccgccgggaacgggcaagtctatgctctcccaacggctgcccggcatcctgccgccgctgaccgaagacgaattggtagaagtttgggcattgcgttcgctcctgcccaaccaccagcaacaactcgacagcaaccgtcctttccgcagtccgcatcacagcgccagcgcggcggctatggtcggcggcggttcggatccgcgtccgggcgaaatttcattggcgcatcacggcgttttatttttggatgaattgcccgagttcgaccgcaaagttttggaagttttgcgcgaaccgttggaaaacggcgaaatccacatttcccgagcggcgcgccaagccgtctatcccgccaaattccaacttgtcgccgccatgaacccctgcccgtgcggctatctcgggcatcccgtcaaaccctgccgctgcacgcccgaaagcgtcgcgcgttaccgcagcaaaatttccggcccgctgctcgaccgcatcgatttgaccatcgaagtccccagcctgtccgccgccgaactgatgcagcaggaagcgggtgaaagcagcgtgtccgttttggaacgcgttatcgccgcccgcgacaaacaatacgcacggcaaggcaaagtgaatgccgccttgagtgtcagtgaactcgacacatccgcccgcattcaaaaagaagcgcaggaagcattgggcggcctgctggaaaaactctccctttccgcccgcagcttccaccgcattatgcgcgtggcgcgtacattggcggatttggcgggcgacgaagaagtcggcagaagccacgtcatgaaagccataggtttccgtcgcgctttatag

SEQ ID NO: 69972 - DNA, 1251 bp, Neisseria meningitidis
ttgcctgaaatgccgtttgaaggctcaagcggtttcggacggcatattccatcaggctgtcaaacagggaaaaacaagatgaaacgtgatttgagcaaaatgacctgcatcgaagacttgcgccgcgttgccaagcgcaaaatgccgcgtatgttttacgattacatcgattcgggttcgtggacggaaacgacttatcgggaaaatacttcggatttcaaagacatccgcttccgtcaaaaagtattggtcaatatggagggacgcagccttgagactaaaatgatcgggcaggatgtgaaaatgccggtggcgattgcgccgacgggttttaccggcatggcacacgcagacggcgaaattttggcggcgcgggcggcggagaagttcggtattccgtttacgttgtccaccatgtccatctgctcgattgaagacgttgccgagaacaccagcgcgccgttttggtttcagctttatgtgatgcgcgaccgcgaatttatggaaaacctgattaagcgcgcgaaggatgccaaatgttcggcattggttttgaccgccgatttgcaggttttggggcaacgccacaaagacatcaaaaacggcctgtccgcgccgccgaaaccgaccatcgccaatttaatcaatctggcgaccaaaccggaatggtgcatgaaaatgctgaacacggaacgccgcacgttccgcaatatcgtcggacacgcgaagaacgtcggcgatttgtcttcgctgtcttcatggacttccgaacaattcgacccgcgcctgagctgggacgatgtggcgcgtattaaagatttgtggggcggcaagctgattatcaaaggcattatggaacccgaagacgcggaaaaagcagcgaaaagcggcgcggacgcattgattgtttccaaccacggcggccgacagctcgacgataccgtgtctgccatcaaagccttgcccgacatcgtcagcgcagtgggcagcgacatcgaagtttggatggacagcggtatccgcagcggtcaggatattttgaaggcgtgggctttgggcgcgaaaggtacgatgataggccgggcgtttctgtatggtttgggtgcgtatggtgaagaaggcgtaacccgtgcgctggaaatcctgtataaagaaatggatatatctatggcgtttacgggacaccgcgatattcaagatgtcgatgcttcgattttgagaggcaaagattggggcagggaaacggtttag

SEQ ID NO: 69973 - DNA, 1359 bp, Neisseria meningitidis
atgaaaccactggacctaaatttcatctgccaagccctcaagcttccgatgccgtctgaaagcaaacccgtgtcgcgcatcgtaaccgacagccgcgacatccgcgcgggcgatgtgtttttcgcattggcgggcgggcggtttgatgcgcatgattttgttgaagacgtattggctgctggtgcggcggcggttgtggtttcgcgcgaagattgcgttgcaatggatggcgcgttgaaagtcgatgacacgcttgccgcattgcaaacgttggcaaaggtgtggcgtgaaaatgtgaatccgtttgtgttcggcattaccggttcggtcggcaagacgacggtgaaggagatgctggctgcggtattgcgccgccgtttcggcgataatgccgttttggcgacggcaggcaacttcaacaaccacatcggattgccgttgactttgttgaaattaaacgaaaaacaccgctatgccgtgattgaaatgggtatgaaccattttggcgaactggcggttttgacacaaatcgccaaacccgatgccgcattggtcaacaacgccatgcgcgcccatgtcggctgcggtttcgacggagtgggcgatattgccaaagcgaaaagcgagatttatcaaggcttatgttcagacggcatggcactgattcctcaagaagatgccaatatggctgtcttcaaaacggcaacgcttaatttgaatacgcgcactttcggcatcgatagcggcgatgtccacgcggaaaatatcgtgctgaaaccgttgtcgtgcgaatttgatttggtgtgcggcgacgaacgcgccgccgtggtgctgcctgttcccggccgccacaatgtccacaacgccgccgctgccgccgcgctgtctttggctgcaggtttgagtttgaacgatgtggcggaaggtttgaaaggcttcagcaatatcaaaggccgtctgaacgtcaaatccggaatcaagggcgcaaccctgattgacgatacttataatgcgaaccctgacagcatgaaagccgcgattgacgtgttggcgcgtatgcctgcgccgcgtattttcgtgatgggcgatatgggcgaactgggtgaggacgaagccgccgccatgcacgccgaagtcggcgcgtatgctcgcgaccaaggcatcgaagcggcttattttgtcggcgacaacagcgtcgaagcggcggaaaaatttggcgcggacggtttgtggttcgccgccaaagacccgttgattcaagtgttgcgccacgatttgcccgaacgcgccaccgtgttggtgaaaggttcgcgctttatgcagatggaagaagtggtcgaggcattggaggataagtga

SEQ ID NO: 69974 - DNA, 777 bp, Neisseria meningitidis; identical to SEQ ID NO: 37612

SEQ ID NO: 69975 - DNA, 975 bp, Neisseria meningitidis; identical to SEQ ID NO: 61449

SEQ ID NO: 69976 - DNA, 1545 bp, Neisseria meningitidis
atgaatatggtttccaaactggacaaatactggcagcaccccgccctctactggcctttgctcatcctttttgccgccgccaccccctttaccttcgcaccctactaccacttttggctgatgcccttgattttcggtgccttcgtccgcctcatcgaactgcgtccgcgttttgctgtctcttccgcctacctgttcggcctgaccgcatacacgacacagttctactggatacacaccgccctgcacgacgtttccggcctgcccgacctctatgccgtaccgctgaccttcctactccccgcctaccttgccctttatccggcactgtgtttctggctgtggaaaaaatttaccctgcctcggggcataaaaatcggtttggtactgcccatcctgtggacgctgaccgagtttgcccgcgagcgtttcctgaccggattcggctggggcgcaatcggctactcccaaatcaccccggacagcccgctcgccggctttgccccattgggcggcatccacatggttacactggcaaccgcctttctcggtgtctggctggttttggcgagtgataacaccgcacgttcgggcaaacgcctgcttccgattatcctgattgccgccctgcttgccgcaggctacaccgcccgacaaaccgacttcacccgccccgacggcagccgcagcaccgtcgccctgcttcaaggcaacatcgaccaaaccctcaaatggcgtgaagaccaagtcatcccgaccatacagaaatattacgaacaggtcggcaaaaccactgccgacatcgtcatcctgcccgaaaccgccatccccgttatgcgccaaaacctgccggaaaacatactggcaaaatttgccgaacaggcgcaaaacaacggcagcgcgctcgccgtcggcatcagccaatacacttcggacggcaacggttacgaaaacgccgtcatcaacctgaccggttatcaggaaaacaatcaggacggcatcccctactacgccaaaaaccacctcgtccccttcggcgaatacaaaccgctgcccttcctgaccacgccgctttacaaaatgatgaatatgcccctttccgacttccgcaaaggcggcggtaagcaatccgccctgctgatgaaaaaccaaaaaatcgccttcaacatctgttacgaagacggattcggcgacgaactgattgccgccgccaaagatgccaccctgcttgccaatgccagcaatatggcgtggtacggaaaatccaacgccatgtaccagcacctccaacaatcgcaggcacgggctatggaactcggacgctatatggtccgtgccaccaacaccggcgcaaccgccatcatctcccccaaaggcaacatcatcgcccaagcccaacccgatacggaaaccgtattggaaggacacatcaaaggctatgtcggcgaaacgccctatatgaaaaccggcagttcatggtggttgatgggcatattgaccctagccgcactgattcttttcatcttccgaaacaaagaacactga

SEQ ID NO: 69977 - DNA, 1623 bp, Neisseria meningitidis; identical to SEQ ID NO: 60856

SEQ ID NO: 69978 - DNA, 354 bp, Neisseria meningitidis; identical to SEQ ID NO: 51512

SEQ ID NO: 69979 - DNA, 261 bp, Neisseria meningitidis; identical to SEQ ID NO: 60622

SEQ ID NO: 69980 - DNA, 2049 bp, Neisseria meningitidis; identical to SEQ ID NO: 54488

SEQ ID NO: 69981 - DNA, 1128 bp, Neisseria meningitidis; identical to SEQ ID NO: 62060

SEQ ID NO: 69982 - DNA, 492 bp, Neisseria meningitidis; identical to SEQ ID NO: 61862

SEQ ID NO: 69983 - DNA, 360 bp, Neisseria meningitidis; identical to SEQ ID NO: 45472

SEQ ID NO: 69984 - DNA, 678 bp, Neisseria meningitidis
atgcaagctgattttaaccgccccgtcctcgccgtcgataccggaacttcctatttgtcgctcgcgctgcgcgccgacggcgaaacctgcctgttccatcaggaagtcggcagccgccagtccgcactgattctgccggaaatccgcacgttgtttcacgatgcaggcattaccgccgccgatttgggggcgattgtttatgcgaaaggccccggcgcgtttacgggactgcgtatcggcatcggcgtggcgcaaggtttggcaacgccgtttgatactcctttaatcggcgtaccctcgctcgatgccgccgcctcgctgccgccgccgcaaagctgcatactcgccgctgcggacgcgcgtatgggcgaagtgttttatgcgtggttcgacacgctgaaccgccgccgtttgagcgattatcaggtcgggcgggcggcagacatccggctgccggagggatgtgccttttcagacggcataggcagcgcgttcgcgttggaagaaacgccgccgttttcaggcaaacccgatatgccgaccgccgccgacttcctcaatctggcggcggaaggcggttttcccgccgtcgctgctgcacactccgaactgctctacgtccgcaacaaaatcgccctaaccgccaaagaacaggcggaacggaaagcccgaacatga

SEQ ID NO: 69985 - DNA, 1989 bp, Neisseria meningitidis; identical to SEQ ID NO: 54950

SEQ ID NO: 69986 - DNA, 339 bp, Neisseria meningitidis; identical to SEQ ID NO: 42934

SEQ ID NO: 69987 - DNA, 693 bp, Neisseria meningitidis; identical to SEQ ID NO: 42313

SEQ ID NO: 69988 - DNA, 738 bp, Neisseria meningitidis; identical to SEQ ID NO: 61167

SEQ ID NO: 69989 - DNA, 684 bp, Neisseria meningitidis; identical to SEQ ID NO: 61777

SEQ ID NO: 69990 - DNA, 873 bp, Neisseria meningitidis; identical to SEQ ID NO: 60627

SEQ ID NO: 69991 - DNA, 879 bp, Neisseria meningitidis; identical to SEQ ID NO: 47095

SEQ ID NO: 69992 - DNA, 2310 bp, Neisseria meningitidis; identical to SEQ ID NO: 45075

SEQ ID NO: 69993 - DNA, 672 bp, Neisseria meningitidis; identical to SEQ ID NO: 37112

SEQ ID NO: 69994 - DNA, 1254 bp, Neisseria meningitidis; identical to SEQ ID NO: 61821

SEQ ID NO: 69995 - DNA, 513 bp, Neisseria meningitidis; identical to SEQ ID NO: 55155

SEQ ID NO: 69996 - DNA, 657 bp, Neisseria meningitidis
atggaaaagtcaggcattgtctatctgatgaaaaccgtcatcaagggcgtatataaaatcggcatttcggaggtaagcaattttgaaggcagaatgcgccatttggaaaacaacggctatgcgaacgttgccggattggagcgcatcctcgccgtcaaaaccgacaattacaaagaaaaagaaaacctgctccatgaaattttcagcaaaagcaggataggcgataccgaattgttcgccgtggacgaaaaccttgtaaaacgtttgtttttatcgcttcgcggcgaaatcgtgttcccgaaaaacgaaacggcggaatcggaatttgaaaaaagcgtccacgaacgcaggcaggaagggaatgccgaatccggccgcaaacaactgcttgatttggtacggcgcggacaccgggaatacccttacgcgctgccccggcttttggcgggcgcggcatcctacaagccgaaaaaatcgaaaatccgcctttttaaagaagcatatttccgcaaaaacggcaggaggctgacggacgaaattgcagacggcatccatatttacacctgtttttcgcgggcggatttggaaaaagcctattccgaatatttggaacttttcaaatccgaatcggatgccgaaagcagaaaaccacggtaa

SEQ ID NO: 69997 - DNA, 1308 bp, Neisseria meningitidis; identical to SEQ ID NO: 55742

SEQ ID NO: 69998 - DNA, 942 bp, Neisseria meningitidis; identical to SEQ ID NO: 60616

SEQ ID NO: 69999 - DNA, 1101 bp, Neisseria meningitidis; identical to SEQ ID NO: 60419

SEQ ID NO: 70000 - DNA, 774 bp, Neisseria meningitidis; identical to SEQ ID NO: 61361

SEQ ID NO: 70001 - DNA, 1104 bp, Neisseria meningitidis; identical to SEQ ID NO: 55122

SEQ ID NO: 70002 - DNA, 2439 bp, Neisseria meningitidis; identical to SEQ ID NO: 54323

SEQ ID NO: 70003 - DNA, 963 bp, Neisseria meningitidis; identical to SEQ ID NO: 55895

SEQ ID NO: 70004 - DNA, 792 bp, Neisseria meningitidis; identical to SEQ ID NO: 55673

SEQ ID NO: 70005 - DNA, 876 bp, Neisseria meningitidis; identical to SEQ ID NO: 54485

SEQ ID NO: 70006 - DNA, 129 bp, Neisseria meningitidis; identical to SEQ ID NO: 55260

SEQ ID NO: 70007 - DNA, 168 bp, Neisseria meningitidis; identical to SEQ ID NO: 43416

SEQ ID NO: 70008 - DNA, 1539 bp, Neisseria meningitidis; identical to SEQ ID NO: 61574

SEQ ID NO: 70009 - DNA, 270 bp, Neisseria meningitidis; identical to SEQ ID NO: 37545

SEQ ID NO: 70010 - DNA, 324 bp, Neisseria meningitidis; identical to SEQ ID NO: 50928

SEQ ID NO: 70011 - DNA, 756 bp, Neisseria meningitidis; identical to SEQ ID NO: 61845

SEQ ID NO: 70012 - DNA, 480 bp, Neisseria meningitidis; identical to SEQ ID NO: 54289

SEQ ID NO: 70013 - DNA, 330 bp, Neisseria meningitidis; identical to SEQ ID NO: 46537

SEQ ID NO: 70014 - DNA, 660 bp, Neisseria meningitidis; identical to SEQ ID NO: 60400

SEQ ID NO: 70015 - DNA, 1035 bp, Neisseria meningitidis; identical to SEQ ID NO: 55309

SEQ ID NO: 70016 - DNA, 993 bp, Neisseria meningitidis; identical to SEQ ID NO: 55577

SEQ ID NO: 70017 - DNA, 798 bp, Neisseria meningitidis; identical to SEQ ID NO: 60533

SEQ ID NO: 70018 - DNA, 1578 bp, Neisseria meningitidis
atgcgcgccaaccccaaaacacaggcaatgccgtctgaaaccatatccctgatgaaaacacgcagcctaatttcccttttatgcctccttctctgttcatgttcttcatggttgcccccactggaagaacggacggaaagccgtcatttcaatacttccaaacccgtccgcctggacaacatcctgcaaatccggcacacccctcataccaacgggctatccgatatctatctgctgaacgacccccacgaagcctttgccgcccgcgccgcccttatcgaatctgccgaacacagcctcgatttgcaatactacatctggcgcaacgacatttccggccgactgctgttcaacctcgtgtaccttgccgcagaacgcggtgtgcgcgtacgcctgctgttggacgacaacaacacgcgcggattggacgacctcctgctcgccctcgacagccatcccaatatcgaagtgcgcctgttcaaccccttcgtcttccgcaaatggcgcgcactcggctacctgactgacttcccccgcctcaaccgccgcatgcacaacaaatcctttaccgccgacaaccgcgccaccatactcggcggacgcaatatcggcgacgaatacttcaaagtcggtgaggacaccgttttcgccgacctggatatcctcgctaccggcagcgtcgtcggcgaagtatcgcacgacttcgatcgctactgggcaagccattccgcccacaacgccacgcgcatcatccgcagcggcaacatcggcaagggtcttcaagcactcggatacaacgacgaaacgtccagacacgcgctcctgcgctaccgcgaaaccgtcgaacagtcgcccctctaccaaaaaatacagacaggacgcatcgactggcagagcgtccaaacccgcctgatcagcgacgaccctgcaaaaggactcgaccgcgaccgccgcaaaccgccgattgccgggcggctgcaagacgcgctcaaacagcccgaaaaaagcgtctatctggtttcaccctatttcgtccccacaaaatccggcacagacgcactagcaaaactggtgcaggacggcatagacgttaccgttctgaccaactcgctacaggcgaccgacgttgccgccgtccattccggctatgtcaaataccgaaaaccgctgctcaaagccggcatcaaactctacgagctgcaacccaaccatgccgtccctgccacaaaagacaaaggcctgaccggcagctccgtaaccagcctgcacgccaaaaccttcattgtggacggcaaacgcatcttcatcggttcgttcaacctcgacccccgttccgcgcgtctcaacaccgaaatgggcgttgttatcgaaagccccaaaatcgcagaacagatggagcgcacccttgccgataccacccccgaatacgcctaccgcgttaccctcgacaggcacaaccgcctgcaatggcacgatcccgccacccgaaaaacctacccgaacgaacccgaagccaaactttggaaacgcatcgccgcaaaaatcctatccctgctgcccatagaaggtttattatag

SEQ ID NO: 70019 - DNA, 1215 bp, Neisseria meningitidis; identical to SEQ ID NO: 61700

SEQ ID NO: 70020 - DNA, 948 bp, Neisseria meningitidis; identical to SEQ ID NO: 61299

SEQ ID NO: 70021 - DNA, 1311 bp, Neisseria meningitidis; identical to SEQ ID NO: 54412

SEQ ID NO: 70022 - DNA, 792 bp, Neisseria meningitidis
atgaatttatttttcgataccaaattgggaaagcaacaaaataaagcaacccataaaatccgtgtaatgagtgaggcttggctggaaaaaaacggctactgcccctgttgcggaagcaagccgatgcagagatttgccaataacaaacctgttgcagacctcttttgctcaaattgccacgagcaatatgaattaaagagtaaaaatcaaaaaaccataggtaacagtgtgcctgacggtgcatatcgcactatgttggagcgcatccggtcagataccaaccccaactttttctttcttgcatataaaaaagcggattactctatacggcaattggtgcttgtacccaaacatttcatcacgccggacatgattattcccagaaataaaggcattaaaaaccggccgcaccacattatgtgttccatcaatctcgcccctttgcccgaaagcggcaaaatattcttaatagacgattcccgcattatcgaacccgaaaccgttctgaaaaaatggcaatccaatctgtttttacgcaaccaaaatgcggagcgcaaaggctggcttttggctgttatgaaatgtatcgaccaacttcccgaagaattcacattgtcgcaaatatatgaatttgaaaacaaactatccatccaatttccccaaaacaaccatatcagagacaaaatccgccaacagttgcaaattttgcgcgaccaaaatacgatcgaattcattggtcgcggactttacaaaaaaatcgacaaattgcccccgacttccaaggcgttttaa

SEQ ID NO: 70023 - DNA, 3204 bp, Neisseria meningitidis; identical to SEQ ID NO: 61945

SEQ ID NO: 70024 - DNA, 267 bp, Neisseria meningitidis; identical to SEQ ID NO: 43047

SEQ ID NO: 70025 - DNA, 1083 bp, Neisseria meningitidis; identical to SEQ ID NO: 55800

SEQ ID NO: 70026 - DNA, 180 bp, Neisseria meningitidis; identical to SEQ ID NO: 42055

SEQ ID NO: 70027 - DNA, 1008 bp, Neisseria meningitidis; identical to SEQ ID NO: 60359

SEQ ID NO: 70028 - DNA, 237 bp, Neisseria meningitidis; identical to SEQ ID NO: 62085

SEQ ID NO: 70029 - DNA, 423 bp, Neisseria meningitidis; identical to SEQ ID NO: 60813

SEQ ID NO: 70030 - DNA, 1389 bp, Neisseria meningitidis; identical to SEQ ID NO: 55340

SEQ ID NO: 70031 - DNA, 447 bp, Neisseria meningitidis; identical to SEQ ID NO: 60846

SEQ ID NO: 70032 - DNA, 1701 bp, Neisseria meningitidis; identical to SEQ ID NO: 55149

SEQ ID NO: 70033 - DNA, 894 bp, Neisseria meningitidis; identical to SEQ ID NO: 61481

SEQ ID NO: 70034 - DNA, 456 bp, Neisseria meningitidis
ttggacaaacaaatcgacgaccacacccacacgcattttgacggcaaagcccaagtggcggagcaaatcaaaggcatcggttcgataacgacggctacgctgatggcgatgctgcccgaattggggcggctgtcgcacaaacggatagcgagtttggccggcattgccccgcacccgagggagagcggggaaaccaaattcaaaagccgctgctttggcggaaagtctgcggtacgtaaggcgctgtatatggctaccgtggcagcgacacgttttgaaccgcttattcgggatttctaccaacgcctgccgtccgagggtaagccgtataaggttgccgttacggcatgtatgcgcaaactgctgacgatatcgaatgcccggatgcgtgattattttgccgaaaacgataccgccgaaaacgataccgccgaaaacggtatccggacggcttga

SEQ ID NO: 70035 - DNA, 936 bp, Neisseria meningitidis; identical to SEQ ID NO: 51595

SEQ ID NO: 70036 - DNA, 420 bp, Neisseria meningitidis; identical to SEQ ID NO: 42190

SEQ ID NO: 70037 - DNA, 537 bp, Neisseria meningitidis; identical to SEQ ID NO: 37832

SEQ ID NO: 70038 - DNA, 780 bp, Neisseria meningitidis; identical to SEQ ID NO: 60592

SEQ ID NO: 70039 - DNA, 753 bp, Neisseria meningitidis; identical to SEQ ID NO: 38815

SEQ ID NO: 70040 - DNA, 492 bp, Neisseria meningitidis; identical to SEQ ID NO: 36862

SEQ ID NO: 70041 - DNA, 423 bp, Neisseria meningitidis; identical to SEQ ID NO: 37313

SEQ ID NO: 70042 - DNA, 1128 bp, Neisseria meningitidis
atgtacactttccgcccgtttcccaaactgcacacagaaacacacattatgaacatacaaaacatccgcaccctcctcgacaccgtcgccgttccgaatacggcacgcacgctcggcggcgaaaaggccgtccgttcggtcgaacagcgttcagacggcatccatatcgccctgcatttcggcttccctgtcgcgcacatcgccgccgccgtcgccgattccgtacaagaaatcctgatgcccgaaacaggcggcgcgcacatccatctgtccatagacaccgaaatcggcacacataaagtccaacctggcgttaccaccatcaaaggtgtgaaaaacatcattgccgtcgcctccggcaaaggcggcgtgggcaaatcaacaaccaccgccaaccttgccgccgcaatggcgcggatgggcgcgcgcgtcggcgtgctcgatgccgacctttacggcccgagccaaccgaccatgttgggtgtggacgaccgcaaacccgatcagaaaaaccaaaaactcattcccgtcgaatcttcagacggcatacaggtcatgtctatcggctttctcgtcgataccgaccaagccgtcgtctggcgcgggccgatggtcagccaagccttgcagcaactgatgtttcaaagcgagtgggacgaagtggactacctgtttatcgacctgccccccggcacgggcgacatccaactcacgctgtcccaacgcatccccgtaaccggatcggtcatcgtaaccacgccgcaggacatcgccctgatagacgcgcgcaaagccgtggatatgttccgaaaagtcaacattcccattttaggtgtattggaaaatatgtccgtccacatctgctccaactgcggacacagcgaagcactgttcggcacggacggcggcaaagatttggcggcacgcctcaacgtccccctgctcggacagcttcccttaagcctgcccgtgcgcgaagccatggacggcggcacaccggcgcaactgttcgacgaacaccccgccatcgcccgaatctacaccgatgccgcattccaaatcgccctgggcattgccgacaaaggcaaagacttcagcagccggttccctaaaatcgtcgtcgaataa

SEQ ID NO: 70043 - DNA, 402 bp, Neisseria meningitidis; identical to SEQ ID NO: 38334

SEQ ID NO: 70044 - DNA, 405 bp, Neisseria meningitidis; identical to SEQ ID NO: 38321

SEQ ID NO: 70045 - DNA, 483 bp, Neisseria meningitidis; identical to SEQ ID NO: 45182

SEQ ID NO: 70046 - DNA, 1302 bp, Neisseria meningitidis; identical to SEQ ID NO: 39130

SEQ ID NO: 70047 - DNA, 1071 bp, Neisseria meningitidis
atgaaaatcatcctgaccacttctatgtcgggcttgggcggcacggaaaccgccaccgtccgcctcgggcggctgctcaaacggcgcgggcacgacatcatccttgcttcttcggacgggccttttgtcggagaggcgcaagcatcgggcatccgttggcagccggttgatttttaccggggcgggcttgccggctacctcaaaagcacctttgcctacgcccggatgctgcgccgcgaacaacccgacatcatcgactgccaaatggcgcgcgttgttccagcctgcgcccttgccgccaaaatcgtttcgccgaaaaccaaaatcatctaccactcgcacggtttggacgcggcaacctaccccaaaatcgccaagctcttcgacaagctgggcgtgtacatcatcggcaactgtaaacacgagcgcgaaaaactcatccgccacggcttccccgccggccggattgcctacgcctacaacgcactcccccccccggaatttcatttccggaaaaccaaaaaagaatgcgccgtactcggcacactttcccgtttggacaccgtccgcgccgtgcatctgatgttggatattttgaagaaaatggttgaccgcggtatgcctgtacgcctcaacgttgcaggtatcggcgaagaaatggacaacctcaaagcccaagccaaacgtttgggcattgaagacaaagtcaccttcctcggcggcgtccgcgatttgaccggctacttcaaagaagtcgatattttggtgaacacgccgcattgcgtgggcgatcacggcgcaggtgtcggcaacaatattttggaagccggcctttacgacacgcctgtcgtgacctacaacatggcgggcatttccgaaatggtcattaccggccaaaccggctactgcattcctttcggcgacgacgaagcatttatcgaagccgtcgatacactcatcaagcatccagagttgcgcagccaaatgggcaaagccctgcacaaacatgtcgaaaccttatgctccgacgacgaaatctaccgcaccaccatggctgcgtacgaaatgtaa

SEQ ID NO: 70048 - DNA, 855 bp, Neisseria meningitidis; identical to SEQ ID NO: 60909

SEQ ID NO: 70049 - DNA, 567 bp, Neisseria meningitidis
ttgttattgcccttcgccacgctggcattgtgcaccaacgcttttgccgccccgcccagcgacgcgtcgttggcgcgttggctggatacgcagaattttgaccgggatatagaaaaaaatatgattgagggctttaatgccggatttaaaccgtatgcggacaaagcccttgccgaaatgccggaagcgaaaaaagatcaggcggcagaagcctttaaccgttatcgtgagaatgttttgaaagatttgattacgcccgaagtgaaacaggctgtccgtaatactttattgaagaatgcccgtgagatatacacgcaagaagaaattgacggcatgattgccttttacggttcgcctgtcggtcagtccgtcgttgccaaaaatccgcgcttaatcaagaaatcgatgagtgaaatagcagtatcttggactgcattgtcagggaaaatcgcgcgacatcatctgcccgcgtttacggaagagttgcggcgcatcatctgcggcggtaaaaatcccgatgcgggctgtaaacaagccggacaggttgggaaaaggcatcagaaataa

SEQ ID NO: 70050 - DNA, 1722 bp, Neisseria meningitidis; identical to SEQ ID NO: 39869

SEQ ID NO: 70051 - DNA, 192 bp, Neisseria meningitidis; identical to SEQ ID NO: 61779

SEQ ID NO: 70052 - DNA, 573 bp, Neisseria meningitidis; identical to SEQ ID NO: 48968

SEQ ID NO: 70053 - DNA, 1914 bp, Neisseria meningitidis; identical to SEQ ID NO: 61125

SEQ ID NO: 70054 - DNA, 1887 bp, Neisseria meningitidis; identical to SEQ ID NO: 55957

SEQ ID NO: 70055 - DNA, 999 bp, Neisseria meningitidis
atgtccgaaaacaaacaaaacgaagtcctgagcggttacgaacaactcaaacggcgcaaccgccgccgcctcgtaacggcaagttgcttggttgccgcctcctgcatcctgctggcagccgccctcagttccggccctgccgaacagactgccggcgaaacaagcggcgtagaaaacaaagcggcaggtgcggcacaaacccctgccttgaaatccgccgccgacaaaccgcaggacttggcaggcgaagacaagccttctgccgccgacagcgaaatcagcgagcctgaaaacgtaggcgcgccgctggtgctgattaacgagcgcctcgaagacagcaacatcaaaggtttggaagcatccgagaaactgcaacaggcagaaaccgccaaaaccgcaccgaagcaggcaaaacaacgcgctgccgaaaaagtgccggcaactgccgacagtacggatacggtagcgtttgaaaaaccgaaacgcactgccgaaacaaaaccgcaaaaagcggaacgcactgccaaagccaagcccaaagccaaagaaaccaaaaccgccgaaaaagttgccgacaaaccgaaaactgccgccgaaaaaaccaaaccggatacggcaaaatccgacagcgcggtaaaagaagcgaaaaaagccgacaaggctgaaagcaaaaaaacagccgaaaaagaccgttcggacggcaaaaaacacgaaacggcacaaaaaaccgacaaagcggacaagaccaaaaccgccgagaaggaaaaatccggtaaaaaagccgccattcaggcaggttatgccgaaaaagaacgcgccttaagcctccagcgcaaaatgaaggcggcgggtatcgattcgaccatcaccgaaattatgaccgacaacggcaaagtttaccgcgtcaaatcaagcaactataaaaacgcaagggatgccgaacgcgatttgaacaaattgcgcgtacacggtatcgccggtcaggtaacgaatgaatag

SEQ ID NO: 70056 - DNA, 1728 bp, Neisseria meningitidis
atgcagttatcaggcgcgcaaatcatagtgcagagtctcaaagccgaaggtgtcgagtacgttttcggttatcccggcggtgcggttatcgaaatctacgatgcccttttccaactcaataaattcaagcacattctgacccgtcacgagcaggcggcagtacacgcggcagatgcgtatgcgcgcgtcagcggtaaggtgggcgtggcattggttacatccggcccgggcgttaccaatgcactgaccggtattgctactgcctatacggattcgattccgatggtggtcatcagcgggcaggtaggcaattccctgattggtacggatgcgttccaagaagttgatacggtgggtattacccgtccgtgcgtcaaacacaatttcctggttacggacatcaatgagttggcggaaaccattaaaaaggcgttccaaattgccgcaagcggccgaccggggcccgtggtggttgatgtcccgaaagatgttacgcaggcgatggcgaaattcagctatcctcaggaagacatttttatccgttcgtatcaaccggttgttcaagggcatatcggtcagattaaaaaggccgtgcagatgttggcatctgccaaacgtccggtcgtctattttggcggcggcgtggtgttgggtaatgcttctgaagagctgacccgatttgtccgaatgacgggtgctccgtgcacgggtacgctgatgggcttgggcgcttatccttccggcgaccgccaattcctcggtatgctcggtatgcacggtacttacgaggcaaaccttgccatgcagaatgcggatgtcgttcttgccgtaggtgcgcgttttgacgaccgtgtggtttccgtaccgtccaaatttttcgagaaggcgaagaaggttatccatatcgatgtcgatccttccagcatcgccaaacgcgtgaaggcggacattccgattgtcggcgacgtgaaaaacgttttgtccgagatggttgcgctgtggcaaaaacaagagtccgtgccgtctgaagatgctttgggcaaatggtggaaaaccatagaggaatggcgttcccgcgattgcttgtggtttgacaacggcagcgaaattatcaagccacaatatgtgattcagaagcttgccgagattaccggcaattcggcaatcatcacatcggatgtagggcagcatcaaatgtttgcggctcaatattatcccttcgaacgtccgcgccaatggctcaactccggcggtttgggtacgatgggcgttggtctgccttatgcgattggtgcaaaacttgccgccccggatcaagacgtattctgtattaccggcgacggctcgatccagatgaacatccaagagctgtccacctgtttccaatatcggattccggttaacgtcattacgctgaacaacggttatctcggtatggtacgccagtggcaggaaatatattacggcggccgagagtcggaaacttatttcgattctttgcccgatttcgtcaaacttgccgaggcatacggtcatatcggcatccgcgtggacaagaagtctgatgtggaaggtgcgttgttggaagcattgaaccaaaaagacaggctggtgtttatcgacttcctgaccgaccagaaacagaatgtgatgcccatggtcggtaacggcaaaggtttggacgaaatggtacttccgccgcatatgcgtgcggacgaaaaggcgtaa

SEQ ID NO: 70057 - DNA, 855 bp, Neisseria meningitidis; identical to SEQ ID NO: 60466

SEQ ID NO: 70058 - DNA, 1974 bp, Neisseria meningitidis; identical to SEQ ID NO: 60453

SEQ ID NO: 70059 - DNA, 1977 bp, Neisseria meningitidis
atgtccaaactcaaaaccatcgccctgaccgcgtcaggtctgtccgtttgtccgggtttcctatacgcccaaaacacctcatcacaccaaatcggtttggcgattatgcgcttaaactcttcaatactcgacctgcccccgacaaaacaatatttccaatccggcagcctgtggagcgagctgcgccaaggcttccggatgggcgaagtcaatcccgaactggtacgccgccacgaaagcaaattcatcgcaagccacagctatttcaacagggtcatcaaccggagtagaccctatatgtaccatatcgccaacgaagtcaaaaaacgcaatatgcccgccgaagccgccctgcttcccttcatcgaaagcgcgttcgtcaccaaagccaaatcacacgtcggcgcatcgggcctgtggcagttcatgcccgctaccggcaggcattacggcctggaaaaaacaccggtttacgacggcaggcacgacatttacgccgccaccgatgccgcactcaactatctgcaatacctctatggactgttcggcgactggccgctcgcctttgccgcctacaactggggtgaaggcaacgtcggacgcgccatcaaccgcgcccgcgcccaagggctcgaaccgacctacgaaaacctgcgtatgcccaacgaaacgcgcaactatgtccccaagctgctcgccgtgcgcaacattattgccactccccaatctttcggtatgaatatcagcgacatagacaacaaaccctattttcaggcagtcgaaccggatcgtccgctcgacaacgaagccatcgtccggcttgccggcatcacgcaaagcgagctgctcgccctaaaccccgcattcaacgtccccgcgtttatccccaaaagcaaacgcaaactgctgcttcctgtcgcatccgtccaaaccttccaaagcaactacctcaacgccgcacccgacagcctgttttcatgggaagtctatacgcctgccgccaaaaccagcctgtccgacatctcgacggcaaccggcatgagcattgccgacatcaaacgcctcaacaacctgaacggcaaccttgtcaacgcaggacgcagcatccttgtcgccaagaacggcaaaacccttcagacggcatcggaatccgtcgtttccatcgacatcgacaatacgcccgacacctaccgttccaatatgccggcaggcacggtgaacgtcggcattgcccgaatccgacccgccgccgcacagacagcggacattaccgtcgcacctttgccgcagaaaaccgtccgtacggaacccgatccccttgtccgtattgccgaacctgcccttgcgacagccgcagcgcaacctcaaaccgaaaaacagaccgccatgccgtctgaaacccaaaccgcaacactcgcgcagatcatcccccaaaacgacatgcaggcggcagacgaactcatgcagcttgttgcccgaaacaacctgcgccgacaggctgaagaaaccatctccgccgtcatcggcacgcctgacacagttgccgaacacaacatttcctcatctccgcaacataccgttgccgccgacggcaaacgccgggcacgtttggaaacgcgcgtagccaaagctgccgacggcgaagccgaaatctccccgctccatgccagcatccaccgcgttgtagaaggcgacaccctgttcaacattgccaaacgctacaacgtcagcgtagccgacctgattgtcgccaacaacatcaaaggcaacaccatccaaaaaggacaggtactccgcctggcgcaggcagcccctgcccaaacccgtattgaaaaagtatcctacaccgcgcgcaaaggcgacaccttcaaaagtatcgccgcgcgcttcaatatccatatcgacgacatccgccggctcaatcccaacctgaacaccatcaatccgggacagagggtcaaactgattggaagctga

SEQ ID NO: 70060 - DNA, 471 bp, Neisseria meningitidis
gtgcagccggtagcgcaggcagtgcgcctgttatccacgtcatcgctgttgtcggtggcaacggcattaatcgaggcgcatggcgaagagatgaccgcgcccgatttgattgaggttaaccgcgccatgcgccgccgtatgcaggccgagattgccgccttgcgggcggtgcagacggctgctgccgagtctggtgggctgacggccaacgccgtgtataccgaggcttaccaaacggcagaatccctgcgcgcggcggcaggcagtctgaatgcgttggttgcggcggccatcaaccaaaagccgccgctgattgtgcgccaagccccaatcgacggtacgatacaccaaatcgcccacgagttttacggcgatatagcccgcgcagcagagctggtgcgactcaatccccatatccaccaccccgcgtttatcaagcgcggcactttggtcaacagctatgcaaaataa

SEQ ID NO: 70061 - DNA, 1077 bp, Neisseria meningitidis; identical to SEQ ID NO: 62161

SEQ ID NO: 70062 - DNA, 279 bp, Neisseria meningitidis; identical to SEQ ID NO: 36688

SEQ ID NO: 70063 - DNA, 1266 bp, Neisseria meningitidis; identical to SEQ ID NO: 55246

SEQ ID NO: 70064 - DNA, 1203 bp, Neisseria meningitidis; identical to SEQ ID NO: 55366

SEQ ID NO: 70065 - DNA, 423 bp, Neisseria meningitidis
atgatgaaaagaattaagtgcttttgtgataaatttccatcaggagatacatttagaatgtgtatcattctggatgactatgataatagggttgattattatgtaggaatatatgattacattacgtctaccttaatgagcgatatttactatcgatccacgattgatgagcatttcaagattatagaattaatagaaaataatccaaatgaaatttatgatgatggcggtggtcaacaattttgcctagaatttcatcatgataaggtcattttttatcacaatgaatttgatgaagaagatggttatccagtattaagctgttcgctgcatacttttaaaactgctttaattgcttggaatgcttttttgcaattgcctaaaagtattcattcggtggtggagactgtgattgaggaataa

SEQ ID NO: 70066 - DNA, 534 bp, Neisseria meningitidis; identical to SEQ ID NO: 54245

SEQ ID NO: 70067 - DNA, 1911 bp, Neisseria meningitidis
atgactctggaaaccctgatcgccctgccgcgcaacatcaagaaaatctgtttcctcatacacgattttctgatgattttcattgcattctggttcacccaaagcctaaaggccgactactcgaacgaatggttcgaccctgccaactggcagtctttcctattgaccgcgctgttgaccatcggtctgttcgtcagaatggggctctaccgtgccgttacacgcttcatcagcttccgcatcctctccaccgcgctggcaggcagcattgtttccgccgtcctgttcttcctcaacacattgatttttgaagaaaggctgcgcctcgccctgccgattgtctatttcttactgctgtttgtttccgtgaccggctcgcgtatggttttgcgcggactgttgtccgaacaccccaaaaaacagatgatccccgtcatcatttacggcgcgggacggtcgggcagacaactgcttgaggccgtcaaacaaatgcgcgaatattccgccgccgcctttgtggacgacgaccccaaactgtggcgcaccgtcatctgcggccttgccgtttaccgccccgacgacatcgccgccctcatcggacgctacggcgtggaaaaaatcctgctcgccatccccggcgcgactcaggaacaacgccgccgaatcatcagcaaactggaagcctatccgtgcgaagtgttgaccattcccggaatgaaagacctgatggacgggaaaatcagcatcggcacgctcaaaaaaatctccgtctccgacctgctcgggcgcgaccccgtcacgcccgacgaccgcctgatgagtgccgacatcgaaggcaaaaccgtcatggtaaccggcgcgggcggctccatcggttcggaactctgccgccagattatccgccgccgccccgaaaagctgctgctgttcgagttatccgaattcgccctgtacgccatcgaaaaagaattgcgcgaaacctgcatccaaaaacgcctcgacaccgaaatcctgccctttctcggttcggtgcaaaaccgcacgctgctcgaacacgtcatgaccgccttttccgttgcgaccgtctatcacgccgccgcctacaaacacgtccccatggtcgagttcaacaccgtcgaaggcatacgcaacaacatcttcggcacactcgaatgcgcgcttgccgccacggcttcgggcgtggaaaccttcgtcctcatctccaccgacaaagccgtccgccccaccaacacgatgggcgccagcaaacgtatggcggaactctgcctacaggcgctcgccgccgaacccggacaaaaaacccgcttcagcatggtgcgtttcggcaatgttttaggctcgtccggctccgtcgtcccgctgtttgaaaaacagattgcagaaggcggcccgcttaccctgacccaccccgacatcacacgttatttcatgaccatacccgaagccgcccaactcgtcatacaggcaggcgcgatgggtactggcggcgacgtattcgtcctcgatatgggcgaatccgtcaaaatcatcgaccttgcccgccaaatgattaccttaagcggcctcaaacccaaaacacccgaacaacccgacggcgacatcgaaatcctcattaccggactgcgtcccggcgaaaaactctacgaagagctgctcatcggcgacaacgtccgcaaaaccggccatccgcgcattatgacggctgacgaggcgatgctgccgtggcacgagctctctgtcctgctcgaccgcatccgtgcggcctgcgaccgttacgaccagcaggcaatccgcaccctgctcatcaacgccccgaccggctttgccccgagcgacggtatctgcgacctgctttgggtacgagaaacacacagaaaaaatgccgtctga

SEQ ID NO: 70068 - DNA, 840 bp, Neisseria meningitidis; identical to SEQ ID NO: 55776

SEQ ID NO: 70069 - DNA, 828 bp, Neisseria meningitidis; identical to SEQ ID NO: 47531

SEQ ID NO: 70070 - DNA, 996 bp, Neisseria meningitidis
atgaaaacatctatccgatacgcactgcttgccgcagccctgaccgccgcaacccccgcgctggcagacattaccgtgtacaacggccaacacaaagaagcagcacaagccgttgcagatgcctttacccgggctaccggcatcaaagtcaaactcaacagcgccaaaggcgaccagcttgccggtcaaatcaaagaagaaggcagccgaagccccgccgacgtattctattccgaacaaatcccggcactcgccaccctttccgccgccaacctcctagagcccctgcccgcctccaccatcaacgaaacacgcggcaagggcgtgccggttgccgccaaaaaagactgggtggcactgagcggacgttcgcgcgtcgtcgtttacgacacccgcaaactgtctgaaaaagatttggaaaaatccgtcctgaattacgccacgccgaaatggaaaaaccgcatcggttacgcccccacttccggcgcgttcttggaacaggttgtcgccatcgtcaaactgaaaggcgaagcggccgcattgaaatggctcaaaggtctgaaagaatacggcaagccttacgctaaaaactccgtcgcccttcaagcggttgaaaacggcgaaatcgatgccgccctcatcaacaactactactggcacgcttttgcgcgtgaaaaaggcgtacaaaatgtccacacccgcctgaatttcgtccgccacagagatcccggcgcactcgttacctattccggcgcagccgtgttaaaatcctcccaaaacaaggatgaggcgaaaaaattcgtcgccttcctcgccagcaaggaaggacagcgcgccctgaccgccgtccgtgccgagtatcctttgaatccgcacgtggtatccaccttcaatttggaacccatcgccaagttggaagcaccccaagtgtccgccaccactgtttccgaaaaagaacacgccacccggctgcttgagcaagccggtatgaaataa

SEQ ID NO: 70071 - DNA, 519 bp, Neisseria meningitidis; identical to SEQ ID NO: 39562

SEQ ID NO: 70072 - DNA, 195 bp, Neisseria meningitidis; identical to SEQ ID NO: 42321

SEQ ID NO: 70073 - DNA, 549 bp, Neisseria meningitidis; identical to SEQ ID NO: 54418

SEQ ID NO: 70074 - DNA, 2664 bp, Neisseria meningitidis; identical to SEQ ID NO: 56005

SEQ ID NO: 70075 - DNA, 1272 bp, Neisseria meningitidis
gtgggcgacggtgtccacactctgctgctcgacaggcagattgtgcgcgacggcaggaaattcgacgcgccgcttttgtggatggtggtgctgatgacggcgttcagcctgctgatgatttattcggcttctgtgtatttggcatcaaaagaaggcggcgatcagtttttctatttgaccagacaggcggggttcgtcgttgccggcttgatagcgagcggttttttatggtttctttgcaggatgaggacatggcggcggcttgtgccgtggatttttgccttatccggcctgttgctggtagtcgtattgattgccgggcgcgaaatcaatggcgcgacccgttggatacctttgggtccgttgaatttccagccgaccgagctgttcaagctggcggtcatcctttatttggcaagcctgttcacgcgccgtgaagaagtgttgcgcagcatggaaagtttgggttggcagtcgatttggcgggggacggccaatctgatcatgtccgccaccaatccgcaggcacgtcgtgaaacattagaaatgtacggccgtttccgggcgatcatcctgccgattatgctggtggcgttcggtttggtgctgataatggtacagccggatttcggttcgtttgtcgtcattaccgtcattgccgttggaatgctgtttttggcaggattgccgtggaaatattttttcgtcctggtaggcagcgtcttgggcgggatggtgctgatgattaccgccgctccctaccgtgtgcagcgggtagtggcatttttggacccgtggaaagacccgcagggtgccggctaccagcttacccactctctgatggcaatcgggcgcggagagtggttcggtatgggtttgggtgcgagtttgagcaaacgcggctttctgccggaagcgcataccgattttatttttgccatcatcgccgaagaattcggtttcttcggtatgtgcgtgctgatattctgttacggctggctggtggtgcgggcgttttccatcggcaagcagtcgcgcgatttgggtttgactttcaacgcctatatcgcttcgggtatcggcatttggatcggtatccaaagtttcttcaatatcggtgtgaacatcggtgctttgccgaccaaaggtctgacgctgccgttgatgtcctatggcggttcgtcagtctttttcatgctgatcagcatgatgctgctgttgcgtatagattatgaaaaccgccggaaaatgcgcggttatcgggtggagtaa

SEQ ID NO: 70076 - DNA, 900 bp, Neisseria meningitidis; identical to SEQ ID NO: 55702

SEQ ID NO: 70077 - DNA, 618 bp, Neisseria meningitidis; identical to SEQ ID NO: 63864

SEQ ID NO: 70078 - DNA, 126 bp, Neisseria meningitidis; identical to SEQ ID NO: 54224

SEQ ID NO: 70079 - DNA, 819 bp, Neisseria meningitidis; identical to SEQ ID NO: 55934

SEQ ID NO: 70080 - DNA, 696 bp, Neisseria meningitidis
atgaaagcgatgatactggcggcaggacgcggcgagcgtatgcgccctttgaccgataccactccgaagccgctgctcgatgtggcgggtaagcctctaatcggttggcacctatgccgtctgaagcaggcagggtttaccgaaatcgttatcaaccacgcttggctgggtcggcagatagaagaggctttgggcgacggctcggcttatggcgtgaacatcgcctattcgcccgaacccgcaggcggtttggaaacggcaggcggcatcgcgcaggcattgccgctgttgggtgggcagccgtttttggtggtcaacggcgacgtgctgaccgacatcgattttaccgccgcgtttcaggcggcatcgtccctgccggaacatatttccgcccatctgtggctggtggaaaatccgccgcaccatcctgacggcgattttttgctgttgccggacggaagcgtacagtcggaagtatccggcggcaacggattgacattcagcggcgtgggtatttaccgtcctgaaatgtttgacggaatcgaagcgggcagtgtggcgaaactcgcgcccgtattgcggggcgaaatgcggcaaaaccgcgtgagcggacagaagcatacgggcttgtggctggatgtcggcacggtatgccgtctgaaagaggctcaagcccttgcaggggcttggaagtga

SEQ ID NO: 70081 - DNA, 1455 bp, Neisseria meningitidis; identical to SEQ ID NO: 61137

SEQ ID NO: 70082 - DNA, 480 bp, Neisseria meningitidis; identical to SEQ ID NO: 55752

SEQ ID NO: 70083 - DNA, 249 bp, Neisseria meningitidis; identical to SEQ ID NO: 38918

SEQ ID NO: 70084 - DNA, 1290 bp, Neisseria meningitidis; identical to SEQ ID NO: 38999

SEQ ID NO: 70085 - DNA, 702 bp, Neisseria meningitidis; identical to SEQ ID NO: 55714

SEQ ID NO: 70086 - DNA, 957 bp, Neisseria meningitidis; identical to SEQ ID NO: 60995

SEQ ID NO: 70087 - DNA, 855 bp, Neisseria meningitidis; identical to SEQ ID NO: 55482

SEQ ID NO: 70088 - DNA, 183 bp, Neisseria meningitidis
ttggaaatgtttgacggcaaagtagaagcagatgaaagttattttggcggacaacgcaaaggcaaacgcggtcgcggtgctgccggtaaagtcgccgtattcggtcttttgaagcgaaatggtaaggtttatacggttacagtaccgaattcaaaccgctactttatttcctattatccgtga

SEQ ID NO: 70089 - DNA, 420 bp, Neisseria meningitidis; identical to SEQ ID NO: 55512

SEQ ID NO: 70090 - DNA, 1479 bp, Neisseria meningitidis; identical to SEQ ID NO: 61366

SEQ ID NO: 70091 - DNA, 771 bp, Neisseria meningitidis; identical to SEQ ID NO: 61750

SEQ ID NO: 70092 - DNA, 381 bp, Neisseria meningitidis; identical to SEQ ID NO: 39549

SEQ ID NO: 70093 - DNA, 789 bp, Neisseria meningitidis; identical to SEQ ID NO: 60677

SEQ ID NO: 70094 - DNA, 279 bp, Neisseria meningitidis; identical to SEQ ID NO: 36778

SEQ ID NO: 70095 - DNA, 645 bp, Neisseria meningitidis; identical to SEQ ID NO: 61892

SEQ ID NO: 70096 - DNA, 318 bp, Neisseria meningitidis
gtggcaacctcctctgaaatcaaaggcaaatatgttgagaaagttgaagtcgcaaacggcgtcgttaccgcccaaatggcttcaagcggcgtaaacaaagaaatccaaggcaaaaaactctccctgtgggccaagcgtcaagccggttcggtaaaatggttctgcggacagccggttcagcgcgccaaagccgacgccgacgccgttaccgccgccgccaacaagaagatcgacaccaatcattcccacgaacctacatcccgtcattcccgcgaaagcgggaatctaggtctgtcggcgcagaaacttatcgggtaa

SEQ ID NO: 70097 - DNA, 1092 bp, Neisseria meningitidis; identical to SEQ ID NO: 62202

SEQ ID NO: 70098 - DNA, 171 bp, Neisseria meningitidis; identical to SEQ ID NO: 54459

SEQ ID NO: 70099 - DNA, 210 bp, Neisseria meningitidis; identical to SEQ ID NO: 39306

SEQ ID NO: 70100 - DNA, 471 bp, Neisseria meningitidis; identical to SEQ ID NO: 60689

SEQ ID NO: 70101 - DNA, 852 bp, Neisseria meningitidis; identical to SEQ ID NO: 55209

SEQ ID NO: 70102 - DNA, 387 bp, Neisseria meningitidis; identical to SEQ ID NO: 55415

SEQ ID NO: 70103 - DNA, 606 bp, Neisseria meningitidis
atgacaataatgaatatcaatacttccgaaaataaagatgctgttgccgaacacaccggacaatggttggaaaaagccgtcatcggtctgaacctgtgtccctttgccaaagccccccacgttaaaaaccttgtccgcatcgcaatcagcgaagccaaacaccttgacagttttttggaagacttggacgaagaactgcagcgactgggcaatacacccgccaccgaactggaaaccaccctgctggttcacccgaccctattccccgatttcgacgtattcaacgatatgctcgatattgccgatgccgccgttatcgaaaacggcttggaaggcatcgtccaaatcgcaccgttccatccccaattccgctttcagaataccgaacccgacgacatcggcaactacaccaaccgttctccctatccgacgctgcacctcatccgcgaagacagcattgccaaagccgcacaagcctttcccgacacttcggcaatattcgaacgcaatatcgccctgctggaaaaaatgggacatgaaggctgggcaaaactcggtatcacatcctgcccttatccgcacaataagaaaaatatttcaaaatga

SEQ ID NO: 70104 - DNA, 303 bp, Neisseria meningitidis; identical to SEQ ID NO: 54163

SEQ ID NO: 70105 - DNA, 169 bp, Neisseria meningitidis
ttgccctcgttatttacaaaaatttcaggaaaaatgaccgcactttacccttggctaatgccaatttatcatcaaattgctcaaacctttgatgaaggtttggggcatcatgctgtgctgattaaagcggattctggtttaggtgtagaacgtttacacatcaggcggc

SEQ ID NO: 70106 - DNA, 783 bp, Neisseria meningitidis; identical to SEQ ID NO: 61686

SEQ ID NO: 70107 - DNA, 195 bp, Neisseria meningitidis
ttgttgattcaatcggcattatgttttgaggcggaagcccatgaatatactaatattcaagagatggaatgggtgtctttattttctgatccgcaaaaagacgatgatagtcttataacccttaaagatgaaaaaatcactgtaaaaaactatattgtgccttggtggaaaaaagtgaaaactttagaaaattag

SEQ ID NO: 70108 - DNA, 1356 bp, Neisseria meningitidis; identical to SEQ ID NO: 54732

SEQ ID NO: 70109 - DNA, 1719 bp, Neisseria meningitidis
atgaacctacatcaaaccgtcgaacacgaagccgccgccgcctttgccgccgcaggcatcgccggcagccccgttgttttgcagccgaccaaaaatgccgaacacggcgatttccaaatcaacggcgtgatgggtgcggcgaaaaaagccaaacaaaacccgcgcgaactggcgcaaaaggtcgccgacgcattggcaggcaacgccgtcatcgaaagcgcggaagtcgccggtcccggttttatcaacctgcgcctgcgccccgaatttctcgcgcaaaacattcagacggccttgaacgacgcgcgtttcggcatagcgaaaaccgacaaaccgcaaaccgtcgtcatcgactattcctcgcccaatctggcgaaggaaatgcatgtcggtcacctgcgttccagcatcatcggcgacagcatttcgcgcgtgttggcatttatgggcaacaccgtcgtccgtcaaaaccacgtcggcgactggggtacgcagttcggcatgttggtcgcttatttggtcgagcagcaaaaagacaatgccgcgtttgagctggcggatttggagcagttttaccgcgccgccaaagtgcgctttgacgaagatcctgccttcgccgacaccgcgcgcgaatacgttgtgaagctgcaaggcggcgatgaaaccgttttggcattgtggaaacagtttgtcgatatttcgctctcgcacgcccaagccgtttacgacacgctgggcttgaagctgcgccccgaagacgtggcgggcgaatcgaagtacaacgacgatttgcagccagtggtcgatgatttggttcaaaaaggtctggcggtcgaagacgacggcgcgaaagtcgtattcttggacgagttcaaaaacaaagaaggcgaacccgccgcgtttatcgtgcaaaaacaaggcggcggcttcctttatgcttccaccgacttggcgtgtttgcgctaccgtgtcggcacgcttcatgccgaccgcctgctgtacgtcgtcgaccaccgccaagccctgcactttgagcaactctttaccacttcccgcaaagcaggctatctgccggaaaacgtcggcgcggcatttgtcggcttcggcacgatgatgggcaaagacggcaaaccgttcaaaacacgcagcggcgacactgtaaaactggtcgatctgctgaccgaagccgtcgaacgcgccgccgctttggtgaaagagaaaaatcccgaattgggcgcggacgaagccgccaaaatcggcaaaaccgtcggcatcggcgcggtcaaatacgccgacttgagcaaaaaccgcaccagcaattatgtgttcgactgggacgctatgctttcgtttgaaggcaacaccgccccctacctgcaatatgcctacacccgcgtgcaaagcgtgttccgcaaagccggtgaatgggacgcaaccgcaccgactgttttgagcgaaccgctggaaaaacagcttgccgccgagctgctgaaattcgaagacgtgctgcaaagcgtggcggacacggcgtatccgcactacctcgccgcctacctctatcaaattgcgaccctgttcagccgcttctacgaagcctgtccgatactcaaagccgaaagcgcaagccgcaacagccgcctgcaactggcgaagctgaccggcgacacgctgaaacaaggcttggatttgctgggcatcgatgtgttggacgtaatgtaa

SEQ ID NO: 70110 - DNA, 588 bp, Neisseria meningitidis; identical to SEQ ID NO: 38394

SEQ ID NO: 70111 - DNA, 300 bp, Neisseria meningitidis; identical to SEQ ID NO: 55276

SEQ ID NO: 70112 - DNA, 1206 bp, Neisseria meningitidis; identical to SEQ ID NO: 38565

SEQ ID NO: 70113 - DNA, 474 bp, Neisseria meningitidis; identical to SEQ ID NO: 39290

SEQ ID NO: 70114 - DNA, 567 bp, Neisseria meningitidis; identical to SEQ ID NO: 37645

SEQ ID NO: 70115 - DNA, 2028 bp, Neisseria meningitidis; identical to SEQ ID NO: 61002

SEQ ID NO: 70116 - DNA, 2394 bp, Neisseria meningitidis; identical to SEQ ID NO: 54715

SEQ ID NO: 70117 - DNA, 1221 bp, Neisseria meningitidis; identical to SEQ ID NO: 55321

SEQ ID NO: 70118 - DNA, 303 bp, Neisseria meningitidis; identical to SEQ ID NO: 54454

SEQ ID NO: 70119 - DNA, 2397 bp, Neisseria meningitidis; identical to SEQ ID NO: 61710

SEQ ID NO: 70120 - DNA, 171 bp, Neisseria meningitidis; identical to SEQ ID NO: 39149

SEQ ID NO: 70121 - DNA, 330 bp, Neisseria meningitidis; identical to SEQ ID NO: 37077

SEQ ID NO: 70122 - DNA, 1191 bp, Neisseria meningitidis
ttgaagcaccgtctgaaaccttgcgcggacaatccgcctgcgccgaaccgcttaccgccccctgaccgcgattctatgatttatcaaagaaacctcatcaaagaactctcttttaccgccgtcggcattttcgtcgtcctcttggcggtattggtctccacgcaggcaatcaacctgctcggccgtgccgccgacgggcgtgtcgccatcgatgccgtgttggcattggtcggcttctgggtcatcggtatgacgccgcttttgctggtgttgaccgcatttatcagtacgttgaccgtgttgacccgctactggcgcgacagcgaaatgtcggtctggctatcctgcggattggcattgaaacaatggatacgcccggtgatgcagtttgccgtgccgtttgccgttttggttgccgtcatgcagctttgggtgataccgtgggcagagctacgcagccgcgaatacgctgaaatcctgaagcagaagcaggaattgtctttggtggaggcaggcgggttcaacagtttgggcaagcgcaacggcagggtttattttgtcgaaaccttcgataccgaatccggcatcatgaaaaacctgttcctgcgcgaacaggacaaaaacggcggcgacaacatcatcttcgccaaagaaggtaacttctcgctgaacgacaacaaacgcacgctcgaattgcgccacggctaccgttacagcggcacgcccggacgcgccgactacaatcaggtttccttccaaaaactcaacctgattatcagcaccacgccaaaactcatcgaccccgtttcccaccgccgtaccattccgaccgcccaactgattggcagcagcaacccgcaacatcaggcggaattgatgtggcgcatctcgctgaccgtcagcgtcctcctactctgcctgcttgccgtgccgctttcctatttcaacccgcgcagcggacatacctacaatatcttgattgccatcggtttgtttttaatttaccaaaacgggctgaccctgctttttgaagccgtggaagacggcaaaatccatttttggctcggactgctgcctatgcacatcatcatgttcgtcatcgcaatcgtacttctgcgcgtccgcagcatgcccagccagcccttctggcaggcggttggcaaaagtctgacattgaaaggcggaaaatga

SEQ ID NO: 70123 - DNA, 954 bp, Neisseria meningitidis; identical to SEQ ID NO: 54685

SEQ ID NO: 70124 - DNA, 1248 bp, Neisseria meningitidis
atgttgaaacaaacgacacttttggcggcttgcgcctcctttgccgcactgttgggcggttgtgctacccagcagcctgcccccgtcattgcaggcaattcaggtatgcaggacgcgccgtcttcggcagtttacaacaacccctatggagcaacgccgtacagcccggctcctgccagcgatgcgccttatgtgccgccggtgcaaagcgcgccggtttatacgcctcctgcttatgttccgccgtctgcacctgccgtttcgggtacatacattccttcttacgcacccgtcgacatcaacgcggcgacgcatactattgtgcgcggcgacacggtgtacaacatttccaaacgctaccatatctctcaagacgatttccgtgcgtggaacggcatgaccgacaatacgttgagcatcggtcagattgttaaagtcaaaccggcaggatatgccgcaccgaaagccgcagccgtaaaaagcaggccagccgtaccggctgccgcgcaaccgcccgtacagtccgcacccgtcgacatcaacgcggcgacgcatactattgtgcgcggcgacacggtgtacaacatttccaaacgctaccatatctctcaagacgatttccgtgcgtggaacggcatgaccgacaatatgttgagcatcggtcagattgttaaagtcaaaccggcaggatatgccgcaccgaaaaccgcagccgtagaaagcaggcccgccgtaccggctgccgtgcaaacccctgtgaaacccgccgcgcaaccgcctgtgcagtccgcgccgcaacctgccgcgcccgctgcggaaaataaagcggttcccgcgcccgccccgcaatctcctgccgcttcgccttccggcacgcgttcggtcggcggcattgtttggcagcgtccgacgcaaggtaaagtggttgccgatttcggcggcaacaacaagggtgtcgatattgccggtaatgcgggacagcccgttttggcggcggctgacggcaaagtggtttatgcaggttccggtttgaggggatacggcaatctggtcatcatccagcataattcttccttcctgaccgcatacgggcacaaccaaaaattgctggtcggcgaaggccagcaggtcaaacgcgggcagcaggtcgctttgatgggcaataccgacgcttccagaacgcagcttcatttcgaggtgcggcaaaacggcaaaccggttaacccgaacagctatatcgcgttctga

SEQ ID NO: 70125 - DNA, 1680 bp, Neisseria meningitidis; identical to SEQ ID NO: 55561

SEQ ID NO: 70126 - DNA, 1104 bp, Neisseria meningitidis; identical to SEQ ID NO: 56982

SEQ ID NO: 70127 - DNA, 741 bp, Neisseria meningitidis; identical to SEQ ID NO: 60308

SEQ ID NO: 70128 - DNA, 600 bp, Neisseria meningitidis
atgtctgaaaaaccggaaaaaatcgttttggcaagcggcaatgccggcaagctcgaagaattcggcaacttattcaaaccttacagcatcaccgtattgccgcaatccgcattcggcatacccgaatgccccgaaccctatcccacctttgtcgaaaacgcgctggcaaaagcacgccatgccgccgaatacagcgggctgcccgcgcttgccgacgacagcggcatctgtgccgccgccctaaacggcgcgccgggcatccattccgcacgttacgcgggcgacaatcccaaatccgataccgccaacaacctgaaacttgccgccgaacttgccggcaagaccgacaaaagctgctgctacgtctgcgtattggtttttgtccgccataaagacgacccgcgtccaattatcgccgagggcgtatggcacggacaatggaacggcgttcccgccggtgaaaacggtttcggttacgacccgtatttttatctgcccggacacggcaaaaccgccgccgaattggattcggaggtcaaaaaccgcgaaagccaccgcgcgcaggcactcgccgatttaatccgcaaactcgccctttaa

SEQ ID NO: 70129 - DNA, 654 bp, Neisseria meningitidis
atgggattgggcatggaaatcggcaagctgattgtggcttttttggtgctgattaatccgtttagcgcgttgtcgctttaccttgacctgaccaacgggcacagcacgaaggagcgcaggaaggtcgcgcggacggccgccgttgccgtgtttgccgtgattgcggtatttgcgctgatcggcggtacgctgctgaaggttttgggcatcagcgtcggttcgtttcaggtcggcggcggaattttggtgttgctgattgccatttcgatgatgaacggcaacgacaatcccgccaagcagaatctcggcgcgcagccggaaacggggcaggtgcgccccgcccgcaatgccggagcgattgccgtcgtgcccatcgccataccgatcaccatcggcccgggcggtatttcgaccgtgattatttacgcttcggcagccaaaacgtacagcgacatcgcgctgattatcgtggccggtttggtggtcagtgcgatttgttatgccattttaatcgttgccgggaaggtcagccgcctgctgggcgcgacggggctgacgattttaaaccgtatcatgggtatgatgctggcggcggtatcggtggagattattgtgtcgggactgaaaacgatattcccgcaactggcaggttga

SEQ ID NO: 70130 - DNA, 306 bp, Neisseria meningitidis; identical to SEQ ID NO: 54350

SEQ ID NO: 70131 - DNA, 450 bp, Neisseria meningitidis; identical to SEQ ID NO: 55218

SEQ ID NO: 70132 - DNA, 486 bp, Neisseria meningitidis; identical to SEQ ID NO: 37367

SEQ ID NO: 70133 - DNA, 1371 bp, Neisseria meningitidis; identical to SEQ ID NO: 61135

SEQ ID NO: 70134 - DNA, 3615 bp, Neisseria meningitidis; identical to SEQ ID NO: 61539

SEQ ID NO: 70135 - DNA, 1041 bp, Neisseria meningitidis; identical to SEQ ID NO: 54644

SEQ ID NO: 70136 - DNA, 2526 bp, Neisseria meningitidis; identical to SEQ ID NO: 62033

SEQ ID NO: 70137 - DNA, 957 bp, Neisseria meningitidis; identical to SEQ ID NO: 54437

SEQ ID NO: 70138 - DNA, 2463 bp, Neisseria meningitidis; identical to SEQ ID NO: 55437

SEQ ID NO: 70139 - DNA, 951 bp, Neisseria meningitidis; identical to SEQ ID NO: 60390

SEQ ID NO: 70140 - DNA, 933 bp, Neisseria meningitidis; identical to SEQ ID NO: 54672

SEQ ID NO: 70141 - DNA, 354 bp, Neisseria meningitidis; identical to SEQ ID NO: 56124

SEQ ID NO: 70142 - DNA, 411 bp, Neisseria meningitidis; identical to SEQ ID NO: 55930

SEQ ID NO: 70143 - DNA, 606 bp, Neisseria meningitidis; identical to SEQ ID NO: 54648

SEQ ID NO: 70144 - DNA, 942 bp, Neisseria meningitidis
atgaaaaccctgctcctcctcatccccctcgtcctaaccgcctgcggcacactgaccggcatacccgcccacggcggcggcaaacgctttgccgtcgaacaggaactcgtcgccgcatcgtcccgcgccgccgtcaaagaaatggatttgtccgccctgaaaggacgcaaagccgccctttacgtctccgttatgggcgaccaaggttcgggcaacataagcggcggacgctactctatcgacgcactgatacgcggtggctaccacaacaaccccgaaagtgccacccaatacagctaccccgcctacgacactaccgccaccaccaaatccgacgcgctctccagcgtaaccacttccacatcgctcttaaacgcccccgccgccgccctgactagaaacagcggacgcaaaggcgaacgctccgccggactgtccgtcaacggcatgggcgactaccgcaacgaaaccctgctcgccaacccccgcgacgtttccttcctgaccaacctcatccaaaccgtcttctacctgcgcggcatcgaagtcgtaccgcccgaatacgccgacaccgacgtattcgtaaccgtcgacgtattcggcaccgtccgcagccgcaccgaactgcacctctacaacgccgaaacccttaaagcccaaaccaagctcgaatatttcgccgttgaccgcgacagccggaaactgctgattgcccctaaaaccgccgcctacgaatcccaataccaagaacaatacgccctctggatgggaccttacagcgtcggcaaaaccgtcaaagcctcagaccgcctgatggtcgatttctccgacatcaccccctacggtgacacaaccgcccaaaaccgtcccgacttcaaacaaaacaacggtaaaaaccccgatgtcggcaacgaagtcatccgccgccgcaaaggaggataa

SEQ ID NO: 70145 - DNA, 1272 bp, Neisseria meningitidis; identical to SEQ ID NO: 49709

SEQ ID NO: 70146 - DNA, 546 bp, Neisseria meningitidis; identical to SEQ ID NO: 55191

SEQ ID NO: 70147 - DNA, 2118 bp, Neisseria meningitidis
atgacatatgcaaattttaatattaacggttttggagatgtgaaattaacaccctattcaccactcttgggatataaagcttgggattcatttattggttctattcaatccttatctgatttaatctataatgtggataacaatagaaataaaatggaaattactgttaataatgctattcaagctgcagatagctttttaagcagtaattggaagagataacaaaataacaaaataacaaaataacaaaataacaaaataacaaaataacaaaataacaaaataacaaaataacaaaataacaaaataacaaaataacaaaataacaaaataacaaaataacaaaataacaaaataacaaaataacaaaataacaaatactgcttctttacttgcatccctcgataacatttttttaaatttaagaaatgtatctcgagatatacgagaaaaatgctaaaatcctctactgttttacagcatgaattgaattaaataaggattatggaaacgagaggcttggcgaatctataatgaatatagatgattttacaccaagtaagatagcaaacttttttgcggatcctgatacatacagcaatgtattagaagaagtatctaggtttatatattccttagttcctgatgatgcaaacccttggaaagggggcgaagattatattggacgagggataagtgaatggggagagttactggaaaaatggtataaacaagattttctcccttatcttgaaaagaatgggaccaatttccgaaatttgaagattggctgcctgaattccctgaatgggcaagagagtggttgaaattagctctcaaacgttcaggcaaatataacgtttacgacccccttgccctagatttggacggtgacggcatagaaactgtcgccgccaaaggctttgcaggtgcattgttcgaccaccgcagccaaggcatccgcaccgccacgggctggattgctgcatatgacggttttcctgtgcgcaaattaaacagtaacgggggcattattagcacgacagataccatattccaatctttgcatacatggcttgatcatcaaccaaatgatacatgccattgaaaaatatagaaaattaattgaaagcttaaatggatattgaaatgaatgatcacatagtacaaattataagaaggttcgggctaggtaggatatttttttattcgtatagcaaatcatctataataattttttcttcgtatgttgtttattatataatttacaattatcaatttaattacctttcgcttttaatttatttattaccaatgttgtgtagtatatatatgattatatttttttaagaaaaactagggagatattaacgatatatcaaagaaaaaaatttttaaattctattttttcatccagagttgaaataataataggttccaagaaaagaaagttgggtataagcagtttttatttactaaatttattatggcttatttggtgccttatgatttatagagaacaagtccgattaaataacttaactctctttttatcctttatattctcattattttttttattatataattttgttttatttttaaatgtttatgttaattttttcaaattaagagaggctcaatatggaaaataacaaagccaaatctgatgataattcagtttctattgaatttatacaagattttataactgcaagtacggatgtaattaatctgagttacgaaaattttcgtaaaaatttttatacacaaatgtcaactgattctaccaattatgcagccaaacatgaaagtttaggaaaatcggtacaacgtgaattacaaaaaacacaaagtcagttgagacaagttgtaagaaaaatgcagagtaaatataatataaataataaagcacgagtagcagaaatatctttgttaaggcaaatgcaaagccaattttctcgaaaagatgtaaacaaaaatcttggtaacggcaacactttggctcaacaaggcagctacaccaaaaaagacggcacaaccgcgcaagcaggcgattcgctgttggctgctgacaaacctgcacagcctcctcacggacaaaatgctatccattag

SEQ ID NO: 70148 - DNA, 1155 bp, Neisseria meningitidis
ttgttggaacaggatatgagtcaaaatgcctcggtgggcattgtaatgccccaaaaaattccgtttgaggtgccgctggttttggaaaacggtaaaactttgccgcgtttcgatctgatgattgaaacctacggcgagctgaatgctgaaaaaaacaatgcggttttaatctgccacgcgctgtcgggcaaccatcatgttgcgggcaggcattcggcggaagataaatatacgggctggtgggacaatatggtcggacctggcaaaccgattgatacggaacgttttttcgtggtcggtttgaataatctgggcggctgcgacggcagcagcgggcctttgtcgatcaatcctgaaacgggtagggaatacggcgcggattttccgctggttacggtgaaggactgggtaaaatcccaagccgcgcttgccgattatctcagcatcgggcaatgggcggcggttgtcggcggcagcttgggcggcatgcaggctttgcagtgggcgatttcctatcccgaacgcgtgcgccacgccttggtgattgcgtccgcgccgaaactgtccacgcaaaatatcgcgttcaacgatgtggcgcgtcaggcgattttgaccgatcccgatttcaacgaaggacattaccgcagccgcaacaccgttcccgctcggggcttgcggattgcccgcatgatggggcacatcacctatcttgccgaagacggtttgggcaaaaaattcggacgcgatttgcgttccaacggctatcaatacggctatggcgttgaatttgaagtagaatcctatctgcgctatcaaggcgacaaattcgtcgggcggtttgatgccaacacctatttgctgatgaccaaggctttggactatttcgatccggcggcagatttcggcgacagcctgacccgcgccctgcaaaatgtgaaagcgaaattctttgtcgccagcttcagcaccgactggcgtttcgcacccgaacgttcgcacgaactggtcaaggcactgattgccgcccaaaaatccgtgcagtatatcgaagttaaatccgcacacgggcacgatgcctttttaatggaagacgaagcctatatgcgtgcggtcgccgcctatatgaacaacgtttataagggatgtcagcaatga

SEQ ID NO: 70149 - DNA, 1350 bp, Neisseria meningitidis; identical to SEQ ID NO: 61954

SEQ ID NO: 70150 - DNA, 744 bp, Neisseria meningitidis; identical to SEQ ID NO: 55280

SEQ ID NO: 70151 - DNA, 1248 bp, Neisseria meningitidis; identical to SEQ ID NO: 44286

SEQ ID NO: 70152 - DNA, 387 bp, Neisseria meningitidis; identical to SEQ ID NO: 44892

SEQ ID NO: 70153 - DNA, 1056 bp, Neisseria meningitidis; identical to SEQ ID NO: 60358

SEQ ID NO: 70154 - DNA, 255 bp, Neisseria meningitidis; identical to SEQ ID NO: 55434

SEQ ID NO: 70155 - DNA, 633 bp, Neisseria meningitidis; identical to SEQ ID NO: 47747

SEQ ID NO: 70156 - DNA, 1869 bp, Neisseria meningitidis; identical to SEQ ID NO: 55320

SEQ ID NO: 70157 - DNA, 876 bp, Neisseria meningitidis; identical to SEQ ID NO: 54975

SEQ ID NO: 70158 - DNA, 384 bp, Neisseria meningitidis; identical to SEQ ID NO: 50847

SEQ ID NO: 70159 - DNA, 1410 bp, Neisseria meningitidis
atgatgaaaaatcgagtgaccaacatccattttgtcggtatcggcggcgtcggcatgagcggcatcgccgaagtcttgcacaatttgggttttaaagtttccggttcggatcaggcgcgtaatgccgctaccgagcatttgggcagcctgggcattcaagtttatcccggccataccgcagaacacgttaacggtgcggatgtcgtcgttacctctaccgccgtcaaaaaagaaaatcccgaagttgtcgctgcgttggagcagcaaattcccgttattccgcgcgccctgatgttggcggagttgatgcgcttccgtgacggcatcgccattgccggcacgcacggcaaaaccacgaccaccagcctgaccgcctccatcctcggcgcggcaggacttgacccgactttcgttatcggcggcaaactcaacgccgcaggcaccaacgcccgcttgggcaaaggcgaatacatcgttgccgaagccgacgagtcggatgcatcctttctgcacctgacaccgattatgtccgtcgttaccaatatcgacgaagaccatatggatacctacgggcacagcgtcgaaaaactgcatcaggcgtttatcgatttcatccaccgtatgcccttctacggcaaagcctttttgtgtattgacagcgaacacgtccgcgcgattttgcccaaagtgagcaaaccttatgctacttacggtttggacgataccgccgacatctacgccaccgacatcgaaaacgtcggcgcgcaaatgaaattcaccgtccatgttcaaatgaaaggacatgagcaggggtcgtttgaagtcgtgctgaatatgcccggcagacacaacgtgctgaacgcattggcagccatcggcgtggcgctggaagtcggcgcatcggttgaagcgatccaaaaaggcttgctcggctttgaaggtgtcggccgccgcttccaaaaatacggcgacatcaagttgccaaacggcgggaccgcgctcttggtggacgactacggacaccaccccgtcgaaatggcggcgacccttgccgccgcacgcggcgcgtatccggaaaaacgtttggtactcgccttccagccgcaccgctatacccgcacgcgcgatttgtttgaagactttaccaaagtcctcaataccgttgacgcgctggtgctgaccgaagtttatgccgccggtgaagagccgattgccgccgccgattcccgcgctcttgcccgcgccatccgcgtgttgggcaaactcgagccgatttactgcgaaaacgttgccgatctgcccgaaatgctgttgaacgttttgcaggacggcgacatcgtgttgaatatgggtgcgggaagcatcaaccgcgtccccgccgcgctgctggaattgtcgaaacagatttga

SEQ ID NO: 70160 - DNA, 885 bp, Neisseria meningitidis; identical to SEQ ID NO: 55986

SEQ ID NO: 70161 - DNA, 612 bp, Neisseria meningitidis; identical to SEQ ID NO: 55932

SEQ ID NO: 70162 - DNA, 465 bp, Neisseria meningitidis; identical to SEQ ID NO: 62236

SEQ ID NO: 70163 - DNA, 1620 bp, Neisseria meningitidis; identical to SEQ ID NO: 60740

SEQ ID NO: 70164 - DNA, 1470 bp, Neisseria meningitidis
ttgaaagcggttattccgcataccggaggacacgaaatgaacgaatattaccaattaatcaagcatcccgatatttccctttccccgatttcagacggcatcggggtcggcaatccggcaacgggcgaaattttggcgtatgtccgcaatacgggttcggacaaactgaaaaacctgattcaaaaggcggcggcagcgcaaaaattatgggcggcgaaaactgctttggaacgcgccgacatattgtggcgttggtattttttagttaaagaaaacaaagaagcactggcgcgcctgatgacgatggagcagggcaaaagcctgaccgagtcgcgcggcgaaattgattatgcggcttcgtttgtgcgctggtttgccgaagaggcgcggcggattgacggcgatgtgttaacgagtgtaaaagcgtcgcaaaaactggttgtgttgaaacagcctgtcggcgttaccgccgcgattacgccgtggaacttcccatctgcaatgattgcgcgcaaggctgcgcctgctttggcggtgggttgcgcgatgatcatcaaacccgcatcgctcacgcctttgagtgcgtatgccttggcttcgttggcttacgaagcgggcataccgcaggatttgttgcccgtcgtcagcggccgcgcatcggaaatcggccgtgaatttgccacgaacccgattatccgcaaaatcagcttcaccggttcgaccgaagtcggcgcgaaaatttttgccgacagcgcggcggacattaaaaaactcagtttggaactgggcggcaacgcgccgtttatcgtgtttgacgatgccgatttggacaaagccgtcgaaggtgcgctcgccagcaagttccgcaacagcggtcagacctgcgtctgcaccaaccgcgtttacgcccaatccggcatttacgacgaattttgtcgcaaattgagtgaaaaagtagccgagctcaaattgggcaacggcttggaggatggcgtcaaccaagggccgctgattgaggaaaaagcggtggagaaagtcgagcagcacatcgccgacgcgcttgctaaaggtgcaagctgcctgaccggcggcaaacgcagcgcgttgggcggaacgttttttgagccgaccgtcttaagcggcgtaacggcgcaaatggcggtggctcgcgaagaaaccttcgggcctttgtgtccggtattccgttttgaaaccgaagccgaagtcattgaggctgcgaacaatacggaatacggtttggctgcttacctttttaccgctgacaccgcacgccagtggcgcgtcggcgaagcattggaatacggtatggtcggcatcaatacgggcttaatcagtaatgaagcggcaccgttcggcggcgtgaaacgcagcggtttgggacgtgaaggcagcaaatacggtgcggacgaatatctggaattgaaatatctgtgtatggatgtcgggtga

SEQ ID NO: 70165 - DNA, 291 bp, Neisseria meningitidis; identical to SEQ ID NO: 60315

SEQ ID NO: 70166 - DNA, 924 bp, Neisseria meningitidis; identical to SEQ ID NO: 41740

SEQ ID NO: 70167 - DNA, 687 bp, Neisseria meningitidis; identical to SEQ ID NO: 54972

SEQ ID NO: 70168 - DNA, 1431 bp, Neisseria meningitidis; identical to SEQ ID NO: 55213

SEQ ID NO: 70169 - DNA, 846 bp, Neisseria meningitidis; identical to SEQ ID NO: 61468

SEQ ID NO: 70170 - DNA, 1047 bp, Neisseria meningitidis; identical to SEQ ID NO: 61797

SEQ ID NO: 70171 - DNA, 846 bp, Neisseria meningitidis; identical to SEQ ID NO: 36227

SEQ ID NO: 70172 - DNA, 1167 bp, Neisseria meningitidis; identical to SEQ ID NO: 61169

SEQ ID NO: 70173 - DNA, 1080 bp, Neisseria meningitidis; identical to SEQ ID NO: 60797

SEQ ID NO: 70174 - DNA, 1056 bp, Neisseria meningitidis; identical to SEQ ID NO: 54922

SEQ ID NO: 70175 - DNA, 621 bp, Neisseria meningitidis; identical to SEQ ID NO: 54243

SEQ ID NO: 70176 - DNA, 2790 bp, Neisseria meningitidis; identical to SEQ ID NO: 55637

SEQ ID NO: 70177 - DNA, 645 bp, Neisseria meningitidis
atgaagctcaaacatctgttgccgctgctgctgtcggcagtgttgtccgcgcaggcatatgccctgacggaaggggaagactatcttgtgttggataaacccattcctcaagaacagtcgggtaaaattgaggttttggaatttttcggctatttctgcgtacattgccatcatttcgatcctttgttattgaaattgggcaaggcattgccgtctgatgcctatttgaggacggagcacgtggtctggcagcctgaaatgctcggtctggccaggatggcggctgccgtcaatttgtcgggtttgaaatatcaggcaaaccctgctgtgtttaaagcagtttacgaacaaaaaatccgcttggaaaacagggctgttgccggaaaatgggctttgtctcaaaaaggctttgacggcaaaaaactgatgcgcgcctatgattcccccgaagctgccgccgccgcattaaaaatgcagaaactgacggaacaatatggtattgacagcacgccgaccgttattgtcggcggaaaataccgcgttatcttcaataatggctttgacggcggcgttcatacgattaaagaattggttgccaaagtcagggaagaacgcaagcgtcagacccctgctgtacagaaatag

SEQ ID NO: 70178 - DNA, 690 bp, Neisseria meningitidis; identical to SEQ ID NO: 54544

SEQ ID NO: 70179 - DNA, 678 bp, Neisseria meningitidis; identical to SEQ ID NO: 48978

SEQ ID NO: 70180 - DNA, 699 bp, Neisseria meningitidis
gtgcaggcggatttagcttatgccgccgaacgcattacccacgattatccgaaagcaaccggtgcaaacaacacaagcacagtaagcgattatttcagaaacatccgtgcgcattccatccacccccgggtgtcggtcggctacgatttcggcgactggaggatagcggcagattatgccagttacagaaaatggaacaacaataaatattccgtaaacacaaaagaggtgggaagaaacaataacaataacattgacatctggaaagaactgaagacggaaaatcaggaaaacggcagcttccacgccgcttcttctctcggcttatccgccatttacgatttcaaactcaacgataaattcgataaattcaaaccctatatcggtgcgcgcgtcgcctacggacacgttaaacatcaggttcattcggtgagaaaagaaaccacgactgttttcagtaaaccaagtggtagcgttacaaagccaggcgagatcgtagaaactccgaccagcaaacctgcctatcacgaaagccacagtatcagcagcttgggtcttggtgtcatcgccggtgtcggtttcgacatcacgcccaagctgaccttggacaccggataccgttaccacaactggggacgcttggaaaacacccgcttcaaaacccacgaagtctcattgggcatgcgctaccgcttctga

SEQ ID NO: 70181 - DNA, 555 bp, Neisseria meningitidis; identical to SEQ ID NO: 61784

SEQ ID NO: 70182 - DNA, 915 bp, Neisseria meningitidis; identical to SEQ ID NO: 55938

SEQ ID NO: 70183 - DNA, 252 bp, Neisseria meningitidis; identical to SEQ ID NO: 51270

SEQ ID NO: 70184 - DNA, 660 bp, Neisseria meningitidis; identical to SEQ ID NO: 54572

SEQ ID NO: 70185 - DNA, 114 bp, Neisseria meningitidis; identical to SEQ ID NO: 43789

SEQ ID NO: 70186 - DNA, 771 bp, Neisseria meningitidis; identical to SEQ ID NO: 51398

SEQ ID NO: 70187 - DNA, 480 bp, Neisseria meningitidis; identical to SEQ ID NO: 58623

SEQ ID NO: 70188 - DNA, 465 bp, Neisseria meningitidis; identical to SEQ ID NO: 46412

SEQ ID NO: 70189 - DNA, 1008 bp, Neisseria meningitidis; identical to SEQ ID NO: 60309

SEQ ID NO: 70190 - DNA, 582 bp, Neisseria meningitidis; identical to SEQ ID NO: 54271

SEQ ID NO: 70191 - DNA, 198 bp, Neisseria meningitidis; identical to SEQ ID NO: 61508

SEQ ID NO: 70192 - DNA, 795 bp, Neisseria meningitidis; identical to SEQ ID NO: 42340

SEQ ID NO: 70193 - DNA, 1755 bp, Neisseria meningitidis
gtgaaaccgctgcgcagactgacaaacctccttgccgcctgcgccgtagcggccgccgccttcggacagcccgccctcgcggcggacttggcgcaagacccgttcattaccgataacgcccaacggcagcactacgaacccggaggcaaataccacctcttcggcgacccgcgcggcagcgtttccgaccgcaccggtcaaatcaacgtcatccaagactatacccaccagatgggcaacctgctcatccaacaggcaaacatcaacggcacaatcggctaccacacccgcttttccggacacggacacgaagaacacgcccccttcgacaaccacgccgccgacagcgcaagcgaagaaaaaggcagcgtcaacgaaggctttaccgtataccgcctcaactggaaagggcacgaacatcatcccgccgacggctatgacggcccgcagggcggcaattaccccaaacctacgggcgcacgagacgaatacacctatcacgtcaacggcacagcccgcagcattaaactcaatccgaccgacacccgcagcatccggcaacgcatatccgacaactacaacaacctcggcagcaatttctccgaccgcgccgatgaagccaacaaaaaaatattcgagcacaatgccaagctcgaccgctggggcaacagcatggagtttgtcaacggcatcgccgccggagcactcaacccctttatcagcgcgggcgaagccttaggcataggcgacatactgtacggaacgcgctatgccatagacaaagccgcaatgcgcaacatcgcccccttacccgccgagggcaaattcgccgtcatcggcggcttgggcagcgtggcgggctttgaaaagaatacgcgcgaagccgttgaccggtggatacaggaaaaccccaatgccgccgaaaccgtcgaagccctggtcaacgtcctgccgtttgccaaagtcaaaaacctgacaaaggcggcaaaaccggggaaggctgcggttagtggggatttttctaaatcctacacctgctccttccacggcagcaccttggtcaaaacggcagacggctacaaagccattgcccatattcaagccggagaccgcgtcctttccaaggacgaggcaagcggagaaacgggatacaaacccgttaccacccgatacggtaatccgtaccaggaaaccgtttacattgaagtttcagacggcatcggcaacagccaaaccctgatttccaaccgcatccatccgttttacagtcaaggaaaatggatacaggcaggtcgtctgaaaaaaggcgacaccctgctttccgaaagcggcgcaaaacagacggttcaaaacattaccctcaaacagcagccgctcaaagcctacaacctgaccgttgccgactggcatacttacttcgtcaagggagataaggcggaaacggaaggggtgtgggttcataattcttgtccgccatataagagaccaaataacgcaacgacaaaagcacaacgagaaagtgtacaaggaaaaccctgcgttgaatgcggtaaattagccgaaaaaatgattgccgaccataaaaaaccattagttgtcgagtattatgaaacagggacaattgacaaatctaagatgagagcaattgaatcagtacaaccgcaatgtccgacttgttctgcaaaacaaggagggagattaagccaatattcaaaagaacagaaaaggaaactgagtaatgggaataaaaaatga

SEQ ID NO: 70194 - DNA, 1857 bp, Neisseria meningitidis; identical to SEQ ID NO: 56086

SEQ ID NO: 70195 - DNA, 1515 bp, Neisseria meningitidis; identical to SEQ ID NO: 54849

SEQ ID NO: 70196 - DNA, 1155 bp, Neisseria meningitidis
atgtcctgcgaacacttaactatgtcatacagcacctttcccaaaaccaaaaacgacgcgctgaatgagccgatgtttttcggtcagccggttaatgtcgcccgttatgaccagcagaaatacgaggtatttgaaaaactgattgaaaaacaattgtcgtttttttggcggccggaagaaatcgacgtgtcgcgcgaccgtatcgactacgccaacctgcctgaacacgaaaaacatattttcatcagcaatctgaaatatcaaacactgctcgattccatccaagggcgcagtccgaatgttgccttgctgcctttggtttcgattcccgagttggaaacgtggattgaaacgtggagcttcagcgaaaccatacactcgcgcagctatacccacatcatccgcaatattgtgaatgatccgtcggtcgtgtttgatgatattgtcgaaaacgaatacattaccgcccgcgccgaagacattgcctgctattacgatgacttaatcgaatacacccagtattacaacctgttgggcgaaggggtgcataatgtcggcggaaaacccattactgtgtctttgcgcgggttgaagaaaaaactctatctctgcctgatgtgcgtcaacgtgttggaagccatccgtttctacgtttcattcgcctgctcgtttgcttttgccgagcgcgagttgatggaaggcaacgccaaaatcatcaaactgattgcccgcgacgaagccctgcacctgaccggcacgcagcatatgcttaatctgatgcgttcgggtgttgatgattctgaaatggcagaaattgctgccgagttgcaggacgaatgtttccaactcttcaaaaaagcggcggaacaggaaaaagaatgggcggcatatttgtttaaagacggttcgatgattggtttgaacaaagaaatcttatcccaatacgtcgaatatattaccaatctgcgtatgcaggcggtggggttgccggccggatttgaaggcgcaaatcaaaacccgattccgtggattaatgcgtggctgtcgtccgacaacgtacaggtcgcgccgcaggaagtggaaatatcctcttatttgatcggtcagatcgattctgaagtgaatacggatgatttgggcgattttgagttgtaa

SEQ ID NO: 70197 - DNA, 591 bp, Neisseria meningitidis; identical to SEQ ID NO: 37807

SEQ ID NO: 70198 - DNA, 531 bp, Neisseria meningitidis
atgaaatttgtcagcgaccttttttccgtcatcctgtttttcgccacttataccgttaccaaaaacatgattaccgcaacggcggttgccttggttgccggtgtggttcaggcggcttttctgtattggaaatataaaaagctggatacgatgcagtgggtcggactggtgctgattgtcgtattcggcggcgcaaccattgttttgggcgacagccgcttcattatgtggaagccgagcgttttgttttggctgggcgcgctgttcctgtggggcagccacctcgccggtaaaaacggcttgaaggcgagtatcggcagggagattcagcttccggatgccgtatgggcgaaattgacgtatatgtgggtcggtttcctgatttttatgggtatcgccaactggtttgtgtttacccggttcgagtcgcaatgggtcaactataaaatgttcggctcgactgcactgatgcttgttttctttattattcagggtatttatctgagtacctgtctgaaaaaggaggattga

SEQ ID NO: 70199 - DNA, 1137 bp, Neisseria meningitidis; identical to SEQ ID NO: 60826

SEQ ID NO: 70200 - DNA, 1122 bp, Neisseria meningitidis; identical to SEQ ID NO: 54241

SEQ ID NO: 70201 - DNA, 1017 bp, Neisseria meningitidis; identical to SEQ ID NO: 55825

SEQ ID NO: 70202 - DNA, 1047 bp, Neisseria meningitidis; identical to SEQ ID NO: 61211

SEQ ID NO: 70203 - DNA, 567 bp, Neisseria meningitidis; identical to SEQ ID NO: 60925

SEQ ID NO: 70204 - DNA, 492 bp, Neisseria meningitidis; identical to SEQ ID NO: 54727

SEQ ID NO: 70205 - DNA, 1149 bp, Neisseria meningitidis; identical to SEQ ID NO: 54246

SEQ ID NO: 70206 - DNA, 489 bp, Neisseria meningitidis
atgaagaaagatattttttattgtgagcagtggtcttatggttataagaaacttcataagcctttttctgagaaacaagctgaggaaaaacatcttaaaggggagttatatactgccgtaataggttcggcgacacaacctgaatatgtaattaccttgcgagaggaagtaggttttttttcggtacattttttcgataaatttggaagggattatttaacccatcaatttcaaaaatattccaattcgaattattattttctttctatggctgtatggagagattatataactttggaatctcatgatttggcagaaggatatacttatttcttcaatgaaaatacggatgattgctatgttttgaaagaggattttattaataatgagcgatatgaaaaaacagaattatatccccaaaaagataaggtaattctatttccaaagtttggcgaatatgatttggtgttaaatccggacattatttaa

SEQ ID NO: 70207 - DNA, 2136 bp, Neisseria meningitidis; identical to SEQ ID NO: 60596

SEQ ID NO: 70208 - DNA, 603 bp, Neisseria meningitidis; identical to SEQ ID NO: 61144

SEQ ID NO: 70209 - DNA, 876 bp, Neisseria meningitidis; identical to SEQ ID NO: 40452

SEQ ID NO: 70210 - DNA, 1020 bp, Neisseria meningitidis; identical to SEQ ID NO: 44737

SEQ ID NO: 70211 - DNA, 1065 bp, Neisseria meningitidis; identical to SEQ ID NO: 54377

SEQ ID NO: 70212 - DNA, 774 bp, Neisseria meningitidis; identical to SEQ ID NO: 61725

SEQ ID NO: 70213 - DNA, 480 bp, Neisseria meningitidis; identical to SEQ ID NO: 39570

SEQ ID NO: 70214 - DNA, 1584 bp, Neisseria meningitidis; identical to SEQ ID NO: 38663

SEQ ID NO: 70215 - DNA, 462 bp, Neisseria meningitidis
atgtctgatttttcccccatttcccgattccttgccgatgaagccgccacactcgatttgggtgaagcatggtcttcccgtttaaacgcaccgctggtcatttacctcgaaggggatttgggtgcggggaaaaccacgctgacacgcggcatcctgcgcggattgggtcatcagggcgcagtcaaaagcccgacttacgccatcgtcgaatcttatccgctggaacgcttcaccttgcaccatttcgacctctaccgtttcaccacacccgaagaatgggaagatgccggattggacgaactgtttgccgcaaacagcgtctgcctaatcgaatggccgcaacagggcggggaatttacgccgcctgccgacatcaccgcaacattgacacacgacggcgacggcagaaaatgcctgctgaccgcccataccgaacgaggacgcgaaagcctgccgctatga

SEQ ID NO: 70216 - DNA, 918 bp, Neisseria meningitidis; identical to SEQ ID NO: 61242

SEQ ID NO: 70217 - DNA, 312 bp, Neisseria meningitidis; identical to SEQ ID NO: 37456

SEQ ID NO: 70218 - DNA, 921 bp, Neisseria meningitidis; identical to SEQ ID NO: 61951

SEQ ID NO: 70219 - DNA, 1050 bp, Neisseria meningitidis; identical to SEQ ID NO: 54699

SEQ ID NO: 70220 - DNA, 1446 bp, Neisseria meningitidis; identical to SEQ ID NO: 61589

SEQ ID NO: 70221 - DNA, 1407 bp, Neisseria meningitidis; identical to SEQ ID NO: 61222

SEQ ID NO: 70222 - DNA, 471 bp, Neisseria meningitidis; identical to SEQ ID NO: 43747

SEQ ID NO: 70223 - DNA, 1197 bp, Neisseria meningitidis; identical to SEQ ID NO: 61541

SEQ ID NO: 70224 - DNA, 1044 bp, Neisseria meningitidis; identical to SEQ ID NO: 56038

SEQ ID NO: 70225 - DNA, 225 bp, Neisseria meningitidis; identical to SEQ ID NO: 55961

SEQ ID NO: 70226 - DNA, 651 bp, Neisseria meningitidis
atgcccgtgacccgccccgccaaaatcaatacttacacacgcatcatcgacgccagccttgcgcttttcaacgaggaaggcgagcgcaacatcagcaccaaccatattgccgcccacttgggcatcagtccgggcaacctctattaccacttccgcaacaaagacgaaatcatcgtccaactgttcaaacgttacagcgaagccctgctggaatacctcaacgaagccgtgttgccgtctgatgtggaagactccatcaattatatggcgggcatttacgacgtgatgtgggaataccgcttcctattcagcgacgtgaacaccctgcttgcacgcagtgccgaactattgggcgaacacaataccttcacccaagccaaagtctccccgctcttggtcaacctgctgacccagctcaacggtctgaacatcatccaagccgaccaaaccgccatgaacgacctcgccgtcaatatgtggatgatcacgaaatactggttcgacttcgacagctccctgcgcggccgcaccaagctgaccgaagactccaaagcacgcggcgtccgtcgtaccttaagcctccttcgtccttatcttttgcccgaacaccgcgagaaatacgaccggaaaatcggcaacggcaacccgtaa

SEQ ID NO: 70227 - DNA, 1143 bp, Neisseria meningitidis; identical to SEQ ID NO: 61097

SEQ ID NO: 70228 - DNA, 309 bp, Neisseria meningitidis; identical to SEQ ID NO: 55176

SEQ ID NO: 70229 - DNA, 423 bp, Neisseria meningitidis; identical to SEQ ID NO: 61961

SEQ ID NO: 70230 - DNA, 201 bp, Neisseria meningitidis; identical to SEQ ID NO: 37363

SEQ ID NO: 70231 - DNA, 333 bp, Neisseria meningitidis; identical to SEQ ID NO: 55426

SEQ ID NO: 70232 - DNA, 279 bp, Neisseria meningitidis; identical to SEQ ID NO: 62041

SEQ ID NO: 70233 - DNA, 1311 bp, Neisseria meningitidis; identical to SEQ ID NO: 46911

SEQ ID NO: 70234 - DNA, 573 bp, Neisseria meningitidis; identical to SEQ ID NO: 47972

SEQ ID NO: 70235 - DNA, 567 bp, Neisseria meningitidis; identical to SEQ ID NO: 60780

SEQ ID NO: 70236 - DNA, 441 bp, Neisseria meningitidis
atggatgtgaaatatgaatttaccctgccttcgagcagcggtgcggattttcattcggcagaacatctgcctttggtcgtgtatttttatccgaaagacagtacgccgggctgtacgacggaaggcttggatttcaatgcgcgtttggaacagtttgaggcattgggttataccgtggtcggtatttcccgcgacggcgtaaaggcgcatcagaatttttgcgccaagcagggtttccggttcgagctgttgagcgacaaggatgaaacagtgtgccgcctgtttgatgtcatcaaattgaagaaactgtacgggaaagagtcgttaggtatcgagcgcagtacgttcgtcttgaataaggatggagaaatcgcccatgaatggcggaaagtcaaagtggcgggtcatgcacaggaagtgttggaaacgctttcccgataa

SEQ ID NO: 70237 - DNA, 2703 bp, Neisseria meningitidis; identical to SEQ ID NO: 61514

SEQ ID NO: 70238 - DNA, 1362 bp, Neisseria meningitidis
atgctgaaaaaagttttaatcgccaaccgaggcgaaatcgcattacgcgtactccgtgcctgccgcgaaatgggcattgccaccgtcgccgtgcattccgaggccgacaaagacagcctgcacgtcaaactcgccgacgaatccgtgtgcatcggccctgccgcttccgcgcaaagctaccttaacgtccccgccattatcgccgccgccgaagtaagctgcgcggacgctgtccatccgggctacggtttccttgccgaaaacgccgatttcgccgaacaggtcgagcagtccggctttacctttatcggcccgaaacccgacaccatccgcctgatgggcgacaaagtctccgccaaacacgcgatgatagcggcaggcgtaccctgcgtccccggttctgacggcgcattgcccgacgacggcgaagaaatcctcaaaatcgccgataaagtcggttatcccgtcattatcaaagcctccggtggcggcggcggtcgcggtatgcgcgtggtcgagaaaaaagaagacctcctccaatctgtcgaaatgaccaaggccgaagcgggcgcggcattcggcaacccgatggtttacatggaacgctatttgcaacgtccgcgccacgtcgaaatccaagtgattgccgacgaacacggcaacgccatctaccttgccgagcgcgactgttcgctgcaacgccgccaccaaaaagtcatcgaggaagcaccggctccgttcatcactgaaaaagaacgcgccaaaatcggcaacgcctgtgccgatgcctgcaaacgcatcggctaccggggcgcgggtacgtttgagtttttatacgaagacggcgaatttttctttatcgagatgaacacgcgcgttcaggtcgagcatccggttaccgagctcatcaccggcgtggacatcgtgcaggagcaactccgcatcgccgccggcctgcctttgcaatacaaacaaaaggatattcaagtcgaaggccacgcgtttgagtgccgtatcaacgccgaagacccatacaacttcatccccagcccgggcccgattgaaagctgccacctgcccggcggcttcggtatccgcgtggacagccacatttaccaaggctaccgcatcccaccgtactacgacagcctgatcggcaaaatctgcgtacacggcaaaacgcgtgaacaggcaatggcgaaaatgcgcgtcgcactcgccgagctggcggtaaccggcatcaaaaccaatacgccgcttcaccgcgacctgttcgccgatgcgggtttccaaaaaggcggtgtcagcatccactatttggaacactggctggaagatcgcaaagccaaacaggacaagtaa

SEQ ID NO: 70239 - DNA, 1662 bp, Neisseria meningitidis; identical to SEQ ID NO: 54520

SEQ ID NO: 70240 - DNA, 1302 bp, Neisseria meningitidis; identical to SEQ ID NO: 38582

SEQ ID NO: 70241 - DNA, 834 bp, Neisseria meningitidis
atgccgcacgccctcgtcctccaatttccctccgccgaagccctgccttccgacttcccctcccgcctgcccgaacctgattacgccgatgaaaagcgtatgcgttttatcgttgaagaagggttttctttaagcgaggcggacgcggcgttgcttggcagccgtcaaatcgaccacgccgtgttgccggatatggatttcgacgaactcggtttaattgtcagcgatatggattcgacgctgattaccattgaatgcgtcgatgaaattgcggcaggcgtgggtttaaaagacaaagtagcggaaattaccgagcgttcgatgcgcggcgaactcgatttcgaacagtctttacgcagccgcgttgcgctgttggcgggattggacgaacagattttggcggacgtttatgaaaacgttttgaagctctcgcccggtgcggaattcttgttggacgaatgcaaaaggcacgatgtgaaattcctgctggtgtccggcgggttcacattttttaccgaaaggctgcaacaacgactcggcttcgaataccaacacgccaatgttttggaaattgaaaacggcaggttgaccggtcgtctgaaaggcagaatcatcgacgcgcaggcaaaggcggatttattgcgcgaataccgcagccgcctcggattgcagccgcatcaggtgttggcgatgggcgacggtgcgaacgatattccgatgctcaaagaagcgggcataggcgtggcttaccgtgccaaaccgaaagcgcaggcagccgccgatgcctgtatcaacttcggcggtttggagcgtgtacgcggcctgttcaggtag

SEQ ID NO: 70242 - DNA, 969 bp, Neisseria meningitidis; identical to SEQ ID NO: 60918

SEQ ID NO: 70243 - DNA, 1014 bp, Neisseria meningitidis; identical to SEQ ID NO: 36441

SEQ ID NO: 70244 - DNA, 723 bp, Neisseria meningitidis; identical to SEQ ID NO: 42576

SEQ ID NO: 70245 - DNA, 1389 bp, Neisseria meningitidis; identical to SEQ ID NO: 55840

SEQ ID NO: 70246 - DNA, 897 bp, Neisseria meningitidis; identical to SEQ ID NO: 55764

SEQ ID NO: 70247 - DNA, 1527 bp, Neisseria meningitidis; identical to SEQ ID NO: 61618

SEQ ID NO: 70248 - DNA, 237 bp, Neisseria meningitidis; identical to SEQ ID NO: 39540

SEQ ID NO: 70249 - DNA, 561 bp, Neisseria meningitidis
gtgggaatccaggacgaaaaatctccagaaaccgttttacccgataagtttccgcaccgacaggtctggattcccgcctgcgcgggaatgacgatgcaggtatttctgacgattcccggctatgatgttgaggcagaaatcgaaaaattcgtttggatggatgctgtgatttggcagatgccgggctggtggatgcacgagccttggacagtgaaaaaatacatagacgaagtattaaccgctggacacggcaaactctaccaaagcgacggcagacaccgcgtcaatccgactgagggctacggcacaggcggcttgttgcaaggcaaaaaacatatgctttcactgacttggaatgcgccgattgaggcgtttacccgcgaaggcgatttctttgaaggcaaaggcgttgatgttttgtatatgcacttccacaaagccaacgagtttttgggtatgacccgcctgccgacattcttatgtaacgatgtggttaaaaatccgcaagtggaaaaatacttggcagattatcaggcacacttggaaaaagtgttcggctaa

SEQ ID NO: 70250 - DNA, 1104 bp, Neisseria meningitidis; identical to SEQ ID NO: 55602

SEQ ID NO: 70251 - DNA, 762 bp, Neisseria meningitidis
atggatgcgaataaagagccgaattgggaaaaacgtttggaaaacctgcgtcagacgcgccgtatgaaggcagtgccgacttacgcgccgctgtcccgcccctctgaaaccggaacggacgcgcctgtgccgaaactggacgatgagagccgagcccgtgtgttgaaggcgtatctgaaaaaatggcaggaggaacacaatgccgccgttgccgattgcggcgaggaagtcgaaaccgacccgatgattgtccttcaggaaaactggctcaacgcgcaggcttccctgcaaatgtcggtttcggaaaaacacatcgaatcgcggcggagaatccggttcgatgcccaaaaagacagtgccgaatttgaaaccggacagattgaaggcagggaaaacgccgatgcggcagaatcgggtacggcggcagacggggttgcggaaaacggcgaaggcggtgcggaagaggcgttgatgcccgtccaaatcaatatcctgaacccgaaagccgtcaaccggcgcgaagtgttctgcctgtccgaacaggagctgaccgaacggctgatcaaacgcctgcgcccgcatctgaccgataccgtcaacggcatcatccgaacggcggtgcaaaagcagatggcggttttcacctatcagctccagcagatgctgcacgagcaggcgggggcggtagtcgaagacgtgttggaacacgatgtccgcaaaatcctcaacgacatcaagtacgagttaaaatacaaacgctga

SEQ ID NO: 70252 - DNA, 1209 bp, Neisseria meningitidis; identical to SEQ ID NO: 54443

SEQ ID NO: 70253 - DNA, 591 bp, Neisseria meningitidis; identical to SEQ ID NO: 60619

SEQ ID NO: 70254 - DNA, 1581 bp, Neisseria meningitidis
atgtccgtcatcaaacgtgccctgatcagcctgtccgacaaggcaggcgcggtcgaatttgcccaaaccctgcacaagctcggtgtcgaaatcctctccaccggcggcacggcgaaactgcttgccgatgcgggcgttcccgtgattgaagtcgccgactataccggcttccccgaaatgctcgacggccgcgtgaaaacgctgcatccgaaaatccacggcggtattttgggtcggcgcgatttgggcgaacacgtcgccaagatggaagaacacggcatcggcaatatcgaccttgtgtgcgtcaacctttatcccttcgccgccaccatcgccaaaccaaactgcacactggaagacgcgattgaaaacatcgacatcggcggcccgaccatggtgcgttctgccgcaaaaaactggaaacacgtcgccatcgttaccgacaccgccgacttccccgccatcgccgccgaactcgaagccaacaacggcgcgttgagcgacaaaacccgcttcaacctgtcgcgcaaagcgttcagccacaccgcccaatacgacggcatgatttccaactacctgacctcgctttcagacgaggtcttgagcggcacgcccgaaatcggtgaattcccgagccagttcaaccaaagctggattaaagtgcaagacatgcgctacggcgaaaacccgcatcagcgcgccgcgttctaccgcgatattgaccccgccgcaggcagcctttccgcctacaaacaactgcaaggcaaagaattgtcttacaataacatcgccgatgccgatgccgcatgggaagccgtcaaatcctttgacgcgccagcctgcgtgatcgtcaaacacgccaatccgtgcggcgtcgccgttgcagccgatacattgaccgcctacaaactcgcctacgtcaccgacaccaccagcgcgttcggcggcattatcgccttcaaccgcgaagtggacggcgaaaccgtcaaacagattaccgacaaccagtttatggaagtcttgatggcgccgaagtttaccgccgaagccctcgaaatcgccgccgccaagaaaaacgtgcgcgtattggaagtgccgcttgaggcaggcgcaaaccgcttcgaactcaaacgcgtcggcggcggactgttggtgcaaacccccgatattcaccgcctcaaccgcgccgatttgaaagtcgtttccaaacgccaaccgaccgagcaagaatggaacgacctgatgtttgtttggaacgtcgcaaaatacgtcaaatccaacgccatcgtcttcggcaaaggcggtcaaacctacggcatcggcgcaggccaaatgagccgcgtggacagtacccgcatcgccgcccgcaaagcgcaggacgcaggcttggacttaaacggcgcatgtgccgcctctgatgctttcttccccttccgcgacggcgtggacgtgattgccgagcagggcatcaaagccatcatccatccggcaggttcgatgcgcgatcaggaagtcttcgacgcagcggacgaacacggcatcgccatggtcgtaaccgacgtgcgccacttccgccattaa

SEQ ID NO: 70255 - DNA, 2157 bp, Neisseria meningitidis; identical to SEQ ID NO: 54449

SEQ ID NO: 70256 - DNA, 624 bp, Neisseria meningitidis; identical to SEQ ID NO: 62065

SEQ ID NO: 70257 - DNA, 495 bp, Neisseria meningitidis; identical to SEQ ID NO: 54206

SEQ ID NO: 70258 - DNA, 273 bp, Neisseria meningitidis; identical to SEQ ID NO: 36489

SEQ ID NO: 70259 - DNA, 438 bp, Neisseria meningitidis; identical to SEQ ID NO: 43498

SEQ ID NO: 70260 - DNA, 1116 bp, Neisseria meningitidis; identical to SEQ ID NO: 60847

SEQ ID NO: 70261 - DNA, 417 bp, Neisseria meningitidis; identical to SEQ ID NO: 55659

SEQ ID NO: 70262 - DNA, 273 bp, Neisseria meningitidis; identical to SEQ ID NO: 47339

SEQ ID NO: 70263 - DNA, 1470 bp, Neisseria meningitidis; identical to SEQ ID NO: 51727

SEQ ID NO: 70264 - DNA, 777 bp, Neisseria meningitidis; identical to SEQ ID NO: 60554

SEQ ID NO: 70265 - DNA, 354 bp, Neisseria meningitidis; identical to SEQ ID NO: 50832

SEQ ID NO: 70266 - DNA, 1311 bp, Neisseria meningitidis
atgatcgtgcccgacctctttgtcgcccacttccgcgaagccgtcccctacatccgccaaatgcgcggcaaaacgctggtcgccggcatagacgaccgcctgctcgaaggtgataccttaaacaagctcgccgccgacatcgggctgttgtcgcaactgggcatcaggctcgtcctcatccacggcgcgcgccacttcctcgaccgccacgccgccgcgcaaggccgcacgccgcattattgccggggcttgcgcgttaccgacgaaacctcgctcgaacaggcgcagcagtttgccggcaccgtccgcagccgttttgaagccgcattgtgcggcagcgtttccgggttcgcgcgcgcgccttccgtcccgctcgtatcgggcaacttcctgaccgcccgtccgataggtgtgattgacggaaccgatatggaatacgcgggcgttatccgcaaaaccgacaccgccgccctccgtttccaactcgacgcgggcaatatcgtctggctgccgccgctcggacattcctacagcggcaagaccttctatctcgatatgcttcaaaccgccgcctccgccgccgtctcgcttcaggccgaaaaactcgtttacctgaccctttcagacggcatttcccgccccgacggcacgctcgccgaaaccctctcggcacaggaagcgcaatcgctggcggaacacgccggcggcgaaacgcgacggctgatttcgtccgccgttgccgcgctcgaaggcggcgtgcatcgcgtccaaatcctcaacggagccgccgacggcagcctgctgcaagaactcttcacccgcaacggcatcggcacgtccattgccaaagaagccttcgtctccatccggcaggcgcacagcggcgacatcccgcacattgccgccctcatccgcccgctggaagaacagggcatcctgctgcaccgcagccgcgaatacctcgaaaaccacatttccgaattttccatcctcgaacacgacggcaacctgtacggttgcgccgccctgaaaacctttgccgaagccgattgcggcgaaatcgcctgccttgccgtctcgccgcaggcacaggacggcggctacggcgaacgcctgcttgcccacattatcgataaggcgcgcagtatgggcataagcaggctgttcgccctctccacaaataccggcgaatggtttgccgaacgcggctttcagacggcatcggaagacgagttgcccgaaacgcggcgcaaagcctaccgcagcaacggacggaactcgcatattctggtacgtcgcctgcaccgctga

SEQ ID NO: 70267 - DNA, 531 bp, Neisseria meningitidis
atggaaagtttcgagcttgaggatttgacgctgtggctggtacgcgatgcggatgaagcggaaatgtggatagaccgctgggcgatcagttatcccgtcgtgcagatgtccgaagcgtcggccggtcaaagcataggggaatggcaggcagggcttcagacggcatttgaacgcatacgcggcaaatacgtcgccgttgtcgcacacggtgcgggcgcggccgcatttttggcgtggctgtatcaggtagacatcctgacacggaagaaaattgccaacatcatccttgtaccgcagcgtcccgatatttttcccgacgatgcggaacacactttccaacgcgtccgctgtccctgccgtgccgcattggttgtacccgaacacggcggcgtgccgcacggttgggcgcaaaaacaggcggatttgtggaacgcccgcctgttggtttccccgcattcgggcagtttgaacggtatgctcggcggctggcagtggggtatgaagctgatgcaggaaatgttgctggcgtga

SEQ ID NO: 70268 - DNA, 924 bp, Neisseria meningitidis; identical to SEQ ID NO: 56041

SEQ ID NO: 70269 - DNA, 918 bp, Neisseria meningitidis; identical to SEQ ID NO: 37376

SEQ ID NO: 70270 - DNA, 2058 bp, Neisseria meningitidis; identical to SEQ ID NO: 56052

SEQ ID NO: 70271 - DNA, 375 bp, Neisseria meningitidis; identical to SEQ ID NO: 56062

SEQ ID NO: 70272 - DNA, 1482 bp, Neisseria meningitidis; identical to SEQ ID NO: 54741

SEQ ID NO: 70273 - DNA, 645 bp, Neisseria meningitidis; identical to SEQ ID NO: 55078

SEQ ID NO: 70274 - DNA, 300 bp, Neisseria meningitidis; identical to SEQ ID NO: 55025

SEQ ID NO: 70275 - DNA, 300 bp, Neisseria meningitidis
atgaagaaaatgttcgtgctgttctgtatgctgttctcctgcgccttctcccttgcggcggtaaacatcaatgcggcttcgctgcaggagttggaggcgctgccaggcataggcccggcgaaggcgaaggccattgcggaataccgtgcgcaaaacggtgcgttcaagtctgtagacgatttgaccaaggtaaagggcatcggccctgcggtgctggcgaagctgaaggatcaggcttccgtcggtgcgcccgcacccaaagcccccgccaaaccggcaacgaccgcagtgaaaaaatag

SEQ ID NO: 70276 - DNA, 528 bp, Neisseria meningitidis; identical to SEQ ID NO: 62132

SEQ ID NO: 70277 - DNA, 1164 bp, Neisseria meningitidis; identical to SEQ ID NO: 38788

SEQ ID NO: 70278 - DNA, 603 bp, Neisseria meningitidis; identical to SEQ ID NO: 56065

SEQ ID NO: 70279 - DNA, 666 bp, Neisseria meningitidis; identical to SEQ ID NO: 56066

SEQ ID NO: 70280 - DNA, 927 bp, Neisseria meningitidis; identical to SEQ ID NO: 56068

SEQ ID NO: 70281 - DNA, 318 bp, Neisseria meningitidis; identical to SEQ ID NO: 62147

SEQ ID NO: 70282 - DNA, 321 bp, Neisseria meningitidis; identical to SEQ ID NO: 56069

SEQ ID NO: 70283 - DNA, 501 bp, Neisseria meningitidis; identical to SEQ ID NO: 39468

SEQ ID NO: 70284 - DNA, 558 bp, Neisseria meningitidis
atgatcaacgatattcaaaaaacagccgaaggcaaaatgcagcgttcggtcgaagtactgaaagaaaatctggcgaaagtgcgtaccggccgcgcgcataccggcctgctcgaccaagtggaagtcgaatactggggcagcatggtccccgtcagccaagttgccaacgtaacgcttctggacgcgtgcaccatcggcgtgaaaccgtttgagggcaatatggcggccaaagtcgagaaagccatccgcgattcaaacttggggctgaacccggcagctgtcggcgacctgatccgcgtgccgatgcccatgctgaccgaggaacgccgcaaagacctgattaaagtcgtacgcggcgaagcggaagaaggccgcgtctctatccgcaacgtgcgccgcgatgccaacgaccacatcaaaaaactcctcaaagacaaagaaatttccgaagacgaggcacgtcgcggcgaagaagcggttcaaaaactgaccgacaaatacattaccgaagccgacaaactcctgactgccaaagaagaagatttgatggcaatttaa

SEQ ID NO: 70285 - DNA, 1887 bp, Neisseria meningitidis; identical to SEQ ID NO: 56077

SEQ ID NO: 70286 - DNA, 1452 bp, Neisseria meningitidis; identical to SEQ ID NO: 45985

SEQ ID NO: 70287 - DNA, 1047 bp, Neisseria meningitidis; identical to SEQ ID NO: 62162

SEQ ID NO: 70288 - DNA, 2379 bp, Neisseria meningitidis; identical to SEQ ID NO: 62163

SEQ ID NO: 70289 - DNA, 198 bp, Neisseria meningitidis; identical to SEQ ID NO: 47961

SEQ ID NO: 70290 - DNA, 447 bp, Neisseria meningitidis
atgactgataatcgggggtttacgctggttgaattaatatcagtggtcttgatattgtctgtacttgctttaattgtttatccgagctatcgcaattatgttgagaaagcaaagataaatgcagtgcgggcagccttgttagaaaatgcacattttatggaaaagttttatctgcagaatgggagatttaaacaaacatctaccaaatggccaagtttgccgattaaagaggcagaaggcttttgtatccgtttgaatggaatcgcgcgcggggccttagacagtaaattcatgttgaaggcggtagccatagataaagataaaaatccttttattattaagatgaatgaaaatctagtaacctttatttgcaagaagtccgccagttcgtgtagtgacgggctggattattttaaaggaaatgataaggactgcaagttacttaag

SEQ ID NO: 70291 - DNA, 1422 bp, Neisseria meningitidis
atgaccaccatctacaacacccttacccgccaaaaagaaccctttgcccccatcgaccctgaaaacgtgcgtatgtacgtttgcggcatgactgtttacgactattgccacttaggccatgcccgtgtgatggtggtgtttgacatgattgcccgctggctgcgcgagtgcggttatccgctcacttatgtgcgcaacatcaccgacatcgacgacaaaatcattgcccgcgcggctgaaaacggcgagaccatcggcgaactgaccgcgcgtttcattcaggctatgcacgaagatgccgatgctttgggtgtgttgcgtcccgatatcgagccgaaggcgacggaaaacatcccacaaatgattgccatgattgaaaccctgattcaaaacggcaaggcatatcctgccgcaaatggcgacgtttactacgccgtgcgcgagttttccgcttacggacaattatcgggcaaatcattggacgacctgcgcgcgggcgaacgtgtggaagtggacggtttcaaacgcgatccgcttgattttgtgttgtggaaagcggcgaaagcaggcgagccggcgtgggaaagcccttggggcaacggccggccgggttggcacattgaatgctccgccatgagtgaaaacctgttcggcaataccttcgacatccacggcggcggcgcggatttgcagtttccgcaccacgaaaacgaaattgcccaaagcgtcggcgcgacggggcatacctgcggccatcatcacgcgcaaacccaccacggtcaaagcattgccagccacgtcaaatactggttgcacaacggctttatccgcgtggacggcgaaaaaatgtccaaatcgttgggcaacttcttcactatccgcgaagtgttgaaacaatacgaccccgaagtcgtgcgtttcttcatcctgcgcgcccactaccgcagcccgttgaattactccgacgcacatttggacgacgcaaaaggtgcgctgacccgcctgtacactacattgaaaaacacaccagcggctgagtttgacttatctgaaaacgtcaacgactacacccgccgtttctacgccgccatgaacgacgattttggtacggtcgaagcggttgccgtgttgttcgaactggcaggcgaagtgaacaaaaccaatgacgcacagctcgccggctgcctgaaagccttgggcggcatcatcggactgctgcaacgcgatccgaccgagttcctgcaaggcggcgcggcttcagacggtctctccaacgaagaaatcgaagacttgatcgcccggcggaaacaggcgcgcgccgataaaaactgggcggaatccgaccgcatccgcgaccttctgaacgaacacaaaatcattttggaagacaacgccggcggcacgacttggcggcgcggttaa

SEQ ID NO: 70292 - DNA, 1008 bp, Neisseria meningitidis; identical to SEQ ID NO: 62166

SEQ ID NO: 70293 - DNA, 1395 bp, Neisseria meningitidis; identical to SEQ ID NO: 56093

SEQ ID NO: 70294 - DNA, 300 bp, Neisseria meningitidis; identical to SEQ ID NO: 70275

SEQ ID NO: 70295 - DNA, 867 bp, Neisseria meningitidis; identical to SEQ ID NO: 61224

SEQ ID NO: 70296 - DNA, 2274 bp, Neisseria meningitidis
atgaacattactcaaattctttcccaagaactttccgcgactaccgcgcaaatcaatgccgctatcgagcttttggacgacggcgcaaccgtgccctttatcgcccgctaccgcaaggaagccacgggcgggttggacgatacgcagctgcgccggcttgccgagcggctgcaatacctgcgcgagttggaagagcgcaaagccgttgttttaaaaagcattgaagagcaaggcaagctttcagacgacctcagggcgcaaatcgaagccgccgataacaaaaccgcgctggaagacctgtatctgccctacaaacccaaacgccgcaccaaagcgcaaatcgcgcgcgaacacggtttgcagccgctggcggacgtgttgcttgccgagcagccgcaggatgtggaagccgccgcgcagggctacctgaacgaaaacgtccccgacaccaaagccgcattggacggcgcgcgcgcgattctgatggaacagtttgccgaagacgcggaactcatcggcacgctgcgtgataagttgtggaacgaagccgaaatccacgcgcaagtcgttggaggcaaagaaaccgaaggcgaaaaattcagcgattatttcgaccaccgcgaacctattcgtgcgatgcccagccatcgtgcgctggcggttttgcgcggccgcaacgaaggcgtgttgaacatcgcgctcaaataccggcccgacgacacgccgattacgcagcaaagcgaatacgagcaaatcatcgcccgccgtttcaaggtttcagacggccacaaatggctgcgcgacaccgtgcgtctgacttggcgcgcaaaaatctttttgtcgttggaactcgaagccctaaatcgtttgaaagaagccgccgacaccgacgcgattaccgtgtttgcccgaaatctcaaagacttgctgctcgccgcacccgccggacggctgaccactttgggtctagaccctggatacaagaacggcgtgaaatgtgccgtggtggacgacacgggcaagctgctggataccgtcattgtctatttacatcaagaaaacaatatgttggcaacgctgtcgcgcctgattaaaaaacacggtgtgaagctcatcgccatcggcaacggcaccgccagccgcgaaaccgacaaaatcgcgggcgaactggtgcgcggaatgccggaaatggggctgcacaaaatcgtcgtttccgaagccggcgcgtcgatttattccgcgtccgaactggcagcgcgcgagttccccgacttggacgtttccctgcgcggcgcggtgtccatcgcccgcaggctgcaagacccgcttgccgagctggtcaaaatcgaccccaaatccatcggcgtgggccagtatcagcacgacgtgaaccaaagccagctcgccaaatcgctggacgcggtggtcgaagactgcgtgaacgccgtcggcgtggacgtgaatactgcctccgccccgctcttggcgcggatttccggtttgaatcagacccttgcccaaaacatcgtcgcctaccgcaatgaaaacggcgcgttcgacagccgcaaaaaattgctgaaagtaccgcgtttgggcgaaaaaaccttcgagcaggcggcaggctttttgcggattaacggcggcacagagccgttggacgcgagcgccgtccaccccgaagcctatcccgtcgtcgccaaaatgctggcgcaacaaggcattagcgccgccgaactcatcggcaaccgcgagcgcgtgaagcaaatcaaagcgtccgacttcaccgacgaacgcttcggcctgccgaccattttggacatcctgtccgaactggaaaaacccggccgtgatccgcgcggcgcgtttcagacggcatcgtttgccgaaggcatccacgaaatcggcgacttgcaagtcggtatgattttagagggcgtggtttccaacgttgccaacttcggcgcgttcgtggacatcggcgtgcatcaggacggcttggtgcacatctccgccctatccaataaattcgtccaagacccgcgcgaagtggtgaaagccggcgatgtagtgaaagtgaaagtgctggaagtcgatgccgctagaaaacgcatcgcgctgaccatgcgcttggatgacgaaccgggcggcgcaaaacataaaatgccgtctgaaaaccgcagccgcgaacggacagccggccgcaaaccccaacgcaacgaccgcgccccagccaattcggcgatggcggatgcgtttgcgaagctgaagcggtaa

SEQ ID NO: 70297 - DNA, 951 bp, Neisseria meningitidis; identical to SEQ ID NO: 55626

SEQ ID NO: 70298 - DNA, 291 bp, Neisseria meningitidis; identical to SEQ ID NO: 45422

SEQ ID NO: 70299 - DNA, 207 bp, Neisseria meningitidis; identical to SEQ ID NO: 41992

SEQ ID NO: 70300 - DNA, 1110 bp, Neisseria meningitidis
atgtccttgacccgcctaatcttgaaattctatgcactgttgcgcctttttttgggcaaaaacgcccgcaccgcatggatttcgcatcccgcctgtgccgggcacgaacccggcgcaaaccatcccgattcgcccgaccgcatcctctgcatcgagcaggcattgcgccgcgccggtatttggcagcacctccaaaccatagaggcggaagaaatcagcgatacgcgcctcgcacttgtccactcgagcaaatatctgaaccgtttggaatcttgccagccccaaaaaggcaagattttccgcctggatgacgacactgcaatcagcacaggctcgctgtctgccgcacgctttgccgccggttcggcagttcaggcagtcgacatggtcatgaaccgcaaagcatggcatgccttttgcgccgcccgcccgcccggacaccatgcgggcagcggcaaagccggcggattctgcctgctgaacaacgttgccgccggcgtcatgcatgccattgccgaataccgcctgaaacgcattgccgtcatcgatttcgatgtccactacggcgacggtacggcagaaatattcaaagacgatccgcgcatcctgtttttcaacctgtttgaaaccgaccttttccccttccccgaaaacaacgatatgcccgacggcggcaatatggtgcacctgcccttgccgccgggaacgggcagccgcacattccgcgaagccgtccgcaggcagtggctgccccgacttgccgcattcaaacccgaactggtgctgctatcggcaggattcgacgcacaccgtctagacgaatcgggcaggctcaacctgcacgaggcggattttgcctggctgacacacaaaatcattcagacggcatcgggctgccccggcaaaatcgtatccgtactcgaaggcggctacacccttgaacctctggcacaatctgctgccgagcatatccgcgtgctggcagggctgggcaaatccgatgccgcaaccgcctatcagaaaacactggacccaacaaaaaaacggtttgccaaaccgaaaaccggacaggtgcgccaacctacccaatccgaccgttacgacatatag

SEQ ID NO: 70301 - DNA, 543 bp, Neisseria meningitidis; identical to SEQ ID NO: 40003

SEQ ID NO: 70302 - DNA, 1846 bp, Neisseria meningitidis
atgcagacaaattatttgtctgaaacggattcgattatgaaaaaactgatttgcctgttcgccgtatttttgatgttgtgcggacgagctttcgcgctggatgcgaacgatctgctgccgccggaaaaggcattcgtgccggagcttgccgttgccgacgacggtgtgaacgtccgtttcaagattgccgacggatactatatgtatcaggcgaaaatcgtcggcaagaccgatccggcggatttgttgggacagccttctttcagcaagggcgaagagaaggaagacgagtttttcggcaggcagacggtttaccatcacgaagcgcaggttgcctttccttatgcaaaggctgtcggcgaaccgtataaattggttttgacctatcagggctgtgccgaagccggcgtgtgctatccgcccgtggataccgagtttgatatttccggcaacggcacttaccatccgcaaaccgacgaaccggcatccgccaaagaccgctttttgcagccttcctctcaaaacggcagcggggcgctgccgcccccgaagggggatgagggcggcgacagccgtttcaagctgtcttgggatacgctcaacgccaatcttttggcgttttttctcgccggtttgggtctgagttttaccgcctgtatgtatcccctgttgccgattgtttccagtattgtggtcggcgacaaaaaggcgggcaaggcgcgggcgtttgtgctgtccgtcgtttatgttcagggtttggctctgacttatacgctggtcggcattgttgccggactgacgggcgcactgctgaccgtatggttgcagcaggcttgggtcgtgttggcggcatcggctttgatggtcgtcttggcactgtctatgttcgggctgttcaacatccagcttcccaacgccgtgcagtcgtattttcagaatcaaagcagcaggctttcaggcggtaaaatcgtttccgtctttattatgggcatattgtccgcgctgattgtcgggccgtgcgtcgccccgccgctggcatttgctttgggctacatcggtcagacgggcgatgcggttttaggcggtttggcactttacactttggcgttgggcaccggcgttccgctgattgccatcggcacgttcggcgggcatatcctgcctaaggcaggcgattggatgaatgccgtcaaatacgctttcggctttatcctgcttgccgtcgccgtttacctcgccacgccgcacttgccctattatctcgtcgtcgcgctgtacacgctgctgatgctggttcctgcctgtatgctgctggtcaacggacgcaggcagaaacgccgtccgaaagctgtggcattcgcattgggcagcatattgctgataggcggcgcgtggttcggctggcagggcgcaaacggcaaaacgaccgcgctgcaccatttcctgaccctcaatccgccggccgaagcaggcaaatcttcggaacacggcaaaatgtttgccgatactgccgcgctgaaggcagcgatggatacggcgttgaaagaacatcccgacaaacccgtcgttttggatttttatgccgactggtgcatttcctgcaaagaaatggcggcttacacgctcaatcagccggaagtgcatcaggcagtcgatatggaacgctttttccaaatcgacgtaaccgccaacacgcccgaacatcaggcgttgttgaaagaatacggtctgttcgggccgccgggcgtgtttgtcgtccgctccgacggcagccgcagcgagccgctgctgggttttgtcaaagcagacaagtttatcgagtggtatgaacaaaaccgctgattcc

SEQ ID NO: 70303 - DNA, 468 bp, Neisseria meningitidis; identical to SEQ ID NO: 40006

SEQ ID NO: 70304 - DNA, 822 bp, Neisseria meningitidis
ttgttaatccactatactttatgccgctaccgcaaccggctggcgcaagacgacaccctgtccgaattgctcaaactgattaactgccaactgaccgaaaaaggcctaaaagtagagaaagcatccgccgccgtcgttgacgccaccattattcagaccgccggcagcaaacagcgtcaggctatagaagtcgataacaaaggacaagtcagcggccaaaccacaccgagtaaggacagcgatgcccgttggatcaagaaaaacggcctctacaaactcggttacaaacaacatacccgtaccgatgcggaaggctatatcgagaaactgcacattacccccgccaatgcccatgagtgcaaacacctgccgccgttgttggaaggactgcccaaaggtacgaccgtctatgccgacaaaggctatgacagtgcggaaaaccggcaacatttggaagaacatcagttgcaggacggcattatgcgcaaagcctgccgcaaccgtccgctgacggaggcacaaaccaaacgcaaccgatatttgtcgaagacccgttatagtggattaaatttaaatcaggacaaggcgacgaagccgcagacagtacaaatagtacggcaaggcgaggcaacgccgtactggtttaaatttaatccactatatgtggtcgaacagagcttcggtacgctgcaccgcaaattccgctatgcgcgggcagcctatttcgggctgctcaaagtgagtgcgcaaagccacctgaaagcgatgtgtttgaacctgttgaaagcggccaacaggctaagtgcgcccgctgccgcctaa

SEQ ID NO: 70305 - DNA, 558 bp, Neisseria meningitidis; identical to SEQ ID NO: 43644

SEQ ID NO: 70306 - DNA, 435 bp, Neisseria meningitidis; identical to SEQ ID NO: 37953

SEQ ID NO: 70307 - DNA, 408 bp, Neisseria meningitidis; identical to SEQ ID NO: 37952

SEQ ID NO: 70308 - DNA, 402 bp, Neisseria meningitidis; identical to SEQ ID NO: 37951

SEQ ID NO: 70309 - DNA, 318 bp, Neisseria meningitidis
ttgttgatgtgtgtactattgcataggcggttaagccatgcaggagatgaaagtgtatatttcgcgcaaagcccattagccgcaagcgaggggcggggtgcgcgagagagaggggggcaggtgctaagtcattggttatctccttactatctatctaactacgggtgcattatgcgcctatgcctgttgcttgtcaaacactatacagttaaaatgtgtaaagatttagtaaggacatatacccttttctttacatttagctccatcggataccagtgcgttcagagaaaatttgaaaatttctatattttggttgta

SEQ ID NO: 70310 - DNA, 702 bp, Neisseria meningitidis
ttgtctgtaacaggtataaggttctgctataatcaacctatggaaaatattgaagaatacgcactgctgtctcccgaagccctgctggaacgcctggataccgttttgagtatcagaatcggcggcaagggttgggaatccagtatgaccgccaactttgcacagacgctggtcgaaatacaggacagtctgtacagggttgtgtcaaccgtccaatacggggatgacaacctcaagcggttgacagcggacaaacggaagcagtatgagttgaacttcaagatttccgagggttctacgcgtgtagagtccgactttaaagagactttggttcggttcggtagagatatgcttcaagatatgccccctaaaatccgttcggcaacgctggtagcgttgacgaccctgcttgtcggaggggcgttgggttacggttatttggaatacctgaagcaggttgcttcggaagggtatcagaccgagcgtctgtataatgccgtcgaccgtcttgcagaatcccaagaacggataacgtccgccatcctgaagggtgctagaggtgccgatttcgtgcaaatcggcagacgttcctacagtagggaggatatatcggaggcaaatagacgtgcagagcgtgtcccgtatggcgcagagttggtttcagacggcaattttaccgctgttttatctgatataggggat

SEQ ID NO: 70311 - DNA, 1200 bp, Neisseria meningitidis
ttgtccacttttccgaaccacaccatgcacaccatttcctttccaaaccgcacccgactcaccgccctgccgcccctgtcgctttacatccacatcccgtggtgcatcaaaaaatgcccgtattgcgactttaattcccacagcctgaaaaacggattgcccgaagccgcctatatcgacgcgctgctgaccgacttgcagctcgaattgcccaatatttggggcaggccggtggaaacgatctttttcggcggcggtacgcccagcctgtttcaggcggaatcgattgaccgtttattgagcggcgtgcgttcgctgttgcgcttgcagccggaagcggaaattaccttggaagccaatccggggacatttgaaatcgagaagtttcaaggatttaaagacgcaggcatcacgcggctttctattggtgtacagagtttcaacgacgatatgctctcaaggctggggcgcgtccacaacggcaaggaagccttaaccgctatcgataccgccttgaaattatttgataaagtcaatatcgacttgatgtatgccctgccgaaccaaaccgttcagacggcattggacgacgtacaaaccgctatcgctacgggcgcgacccacatcagcgcgtatcatctgacgatggaaccgaacacgccgttcggtcatacgccgccgaaaggtttgccgcaagacgaagccgccctcgacatcgaagacgcggtacacggcgcgctggaaagcgcgggttttgtccactacgaaacatcggcttttgcgaaaccagccatgcagtgccgccacaatttgaactactggcagttcggcgattatttaggcataggcgcgggcgcgcacggcaaaatttcctatcccgaccgcatcgagcgcaccgtccgccgccgccaccccaacgactacctcgccttaatgcaaaaccgaccgagcgaagccgtcgaacgcaaaaccgtcgccgccgaagatttgccgtttgagttcatgatgaacgccctgcgcctgaccgacggcgtacccgccgcgatgttgcaggaacgcacgggcgtaccgagtgccaaaatcatggcgcaaatcgaaacagcaaggcaaaaaggcctgctggaaaccgaccccgccgtattccgcccgaccgaaaaaggacgcttgtttttaaacgatttgctgcaatgttttttatag

SEQ ID NO: 70312 - DNA, 375 bp, Neisseria meningitidis
atgtgcgagttcaaggattttagaagaaacatcccttgttttaaggagtatgacgaaaattcatttattggcaaatggtatgatgacggggtgtgggatgatgaagaatattggaaattggagaatgctttaatcgaggttaggagaaaatatccttatccgatggatataccaagggatatcgtgattggaatcggtagcattattgagtttttaatggttccaaattggaaactttttacaattaaatcttccccttggttgcctaaaagtatcaaaattaatgagcgttatgaaaggttcagagtaatgctccgttatatttttaccgagaaagacatagtcaacgtacgatttgattattacaacaaaaaa

SEQ ID NO: 70313 - DNA, 399 bp, Neisseria meningitidis
atgatgtgcgagttcaaggattttagaagaaacatcccttgttttaaggagtatgacgaaaattcatttattggcaaatggtatgatgacggggtgtgggatgatgaagaatattggaaattggagaatgatttaatcgaggttaggagaaaatatccttatccgatggatataccaagggacatcgtgattggaataggtagcattattgattttttaatggttcaaaattggaaactttttgaaattaaagcttccccttggttgcctaaaagtgtcaaaattaatgagcgttatgaaaggttcagagtaatgctccgttatatttttactgatctagatgtagaggactggaaatttttttactttccaatacaacatagtaaaggtagattgaga

SEQ ID NO: 70314 - DNA, 294 bp, Neisseria meningitidis
ttgagaactgagttcttcaaaaatcctacacttgctccttccacggcagcaccttggtcaaaacggcagacggctgaaaagccattgcccgtatccgaaccggcgaccgcgtcttcgccaaggacgaggcaagcggaaaaacgggatacaaacccgttaccgcccgatacggcaatccgtatcaagaaaccgtttacattgaaatttcagacggcatcggtaaaatacagaccctcgtttccaataaaatccacccgttttacagtcaaggaaagtggatacaggcaggtcgtc

SEQ ID NO: 70315 - DNA, 387 bp, Neisseria meningitidis; identical to SEQ ID NO: 64186

SEQ ID NO: 70316 - DNA, 981 bp, Neisseria meningitidis; identical to SEQ ID NO: 62193

SEQ ID NO: 70317 - DNA, 621 bp, Neisseria meningitidis; identical to SEQ ID NO: 55589

SEQ ID NO: 70318 - DNA, 264 bp, Neisseria meningitidis; identical to SEQ ID NO: 56117

SEQ ID NO: 70319 - DNA, 138 bp, Neisseria meningitidis
atgccgtctgaaaaaatctattacggcgtattgattttcttatgtatcgcttctatgctgctgtcgccgtttttttatgcgggtgctttgaagcccaagaaggcggcattgcggaaggacgggcagtggaaactcatc

SEQ ID NO: 70320 - DNA, 354 bp, Neisseria meningitidis; identical to SEQ ID NO: 56118

SEQ ID NO: 70321 - DNA, 216 bp, Neisseria meningitidis; identical to SEQ ID NO: 37963

SEQ ID NO: 70322 - DNA, 1356 bp, Neisseria meningitidis; identical to SEQ ID NO: 62052

SEQ ID NO: 70323 - DNA, 192 bp, Neisseria meningitidis
ttggaatgggaaacgaagtattgcagcaaatttaatttgcgtgtaaacttcgtttcctgtctttcagtttcttctggaagtttcttcccttttcggggtccaagactggtttacttgaaccgcaaggtttcatttaataagcagcggctttgctgtaagttatctgaaagtggtaaattaagttggttaatt

SEQ ID NO: 70324 - DNA, 366 bp, Neisseria meningitidis
atgattcaaatgcagaccatcttagatgtggctgataactctggtgcgcgtcgcgtaatgtgtatcaaggtattgggcggatctaagcgtcgctacgcttctgttggcgatattattaaagtggcagttaaagatgcggctccgcgtggccgtgtcaaaaaaggcgatgtatataatgcggtagttgttcgtactgctaagggtgtacgtcgtcctgatggtgcgttaattaaattcgataacaatgccgccgtgttactgaataataaacttgaacctttgggtactcgtatctttggtccggtaacccgtgaattgcgtactgagcgatttatgaaaatcgtttcattggcacctgaagtatta

SEQ ID NO: 70325 - DNA, 390 bp, Neisseria meningitidis
atgagtatgcatgatcctatttccgatatgttgactcgtatccgcaatgcgcaacgtgctaataaagcagcggttgcaatgccttcttcaaaattaaagtgtgctattgcaaaggtattgaaagaagaaggatatattgaggacttcgcagtttcatctgacgtaaagtctatattggaaattcaattaaaatactatgcaggtcgtcctgtaattgaacaaatcaagcgtgtatctcgccctggtttgcgtatttataaagcgtctagtgagattccaagtgttatgaatggcttgggtattgctattgttagtacttctaaaggtgtaatgactgatcgtaaagcacgttctcaaggtgttggtggtgagttgttatgcattgtagcc

SEQ ID NO: 70326 - DNA, 432 bp, Neisseria meningitidis
atgtttttgaatacaattcaacctgctgttggtgctacgcatgctggtcgtcgtgttggacgcggtattggtagtggtcttggcaaaacgggtggtcgtggtcataaaggtcaaaagagccggtctggtgggtttcataaggtgggtttcgagggtggtcaaatgcccttgcaacgacgcctccctaaaagaggttttaaatctttaacagcatcagctaatgcacagcttcgtttaagtgaactggaatcaattgctgttaatgagattgatattttggtcttaaagcaagcgggtctgattgcatctacagtctctaatgttaaagttattgcttctggtgaaatttctaaggcagttgctttgaagggtattaaagttaccaaaggtgcgagagctgctatcgaggctgttggtggtaagattgaaatg

SEQ ID NO: 70327 - DNA, 393 bp, Neisseria meningitidis
atggctaaagcaaacacagcttcacgtgtacgtaaaaaagtacgtaaaaccgtgagtgagggtattgtgcacgttcatgcatctttcaacaataccatcattacaatcactgaccgtcaaggcaatgcgttgtcttgggctacctctggcggcgctggttttaaaggttctcgtaaaagtacaccatttgcagcacaagttgcagcagaagcagctggtaaagttgcccaagagtatggcgttaaaaatttagaggttcgtattaaaggtccaggtccaggtcgtgaatcctctgtacgtgctttgaatgctcttggtttcaagattaccagcattactgacgttaccccgttgcctcataacggttgccgtccgcctaaaaaacgtcgtatt

SEQ ID NO: 70328 - DNA, 360 bp, Neisseria meningitidis
atggctcgtattgcaggggtaaatatccctaataacgcacacatcgtaattggtcttcaggctatttacggtattggtgctactcgtgctaaattgatttgtgaggctgcaaatattgcgcctgatactaaagcaaaagatttggacgagactcaattagatgctttgcgtgaccaagttgccaagtatgaagtagaaggtgatttgcgtcgtgaggtaactatgagtatcaagcgattgatggacatgggctgctatcgtggcttccgtcatcgtcgcggcttaccatgccgcggtcaacgcactcgtacaaatgcgcgtacccgcaaaggtccgcgtaaagcgattgctggtaagaaa

SEQ ID NO: 70329 - DNA, 216 bp, Neisseria meningitidis
atggcgaaagaagatactatccaaatgcaaggtgaaattcttgaaactttacctaatgcaacatttaaagtaaaacttgagaatgaccatattgtattgggtcatatttctgggaagatgcggatgcattacattcgtatttctccgggagataaggtcacagtagagctgacaccttatgatctaactagggctcgaatcgttttcagagcaaga

SEQ ID NO: 70330 - DNA, 111 bp, Neisseria meningitidis; identical to SEQ ID NO: 40033

SEQ ID NO: 70331 - DNA, 2237 bp, Neisseria meningitidis; identical to SEQ ID NO: 56128

SEQ ID NO: 70332 - DNA, 414 bp, Neisseria meningitidis
ttgacagaagaaatgatgaaaaagcagcggcatatcctgtgtgtcggctgcctgtatattatattgaaggtcaacgtatttcccaataccggctggatggaagcgtcgaaagggatgcagggcatgtcgttcagtaccttcggatacgcggatgctccgggctatacattcagccgcattggccatactttaattttcctacttggaaagaccacagggacacgtacaactgtttccgatagttcgcataatgtatattatgttaaattatatatttgtgcaaataactccaaggcattaagctgttgtttgatgctttgccagtttgggagaaagttgtccatatgcgccataaaacgggcgttgcgatggcgttcgagcaaatgggtcagttcgtggacgacgacgtattaa

SEQ ID NO: 70333 - DNA, 369 bp, Neisseria meningitidis; identical to SEQ ID NO: 54117

SEQ ID NO: 70334 - DNA, 408 bp, Neisseria meningitidis; identical to SEQ ID NO: 52045

SEQ ID NO: 70335 - DNA, 1041 bp, Neisseria meningitidis
atgaaagcaatggtttatcacggcgcaaacgacatccgttttgaagaaaaaccccgtccgcagattatcgatccgaccgatgcggtggtgaaaatcgtcaaaaccacgatttgcggtaccgatttgggtatttggaaaggcaaaaaaaccgaagtcgccgacggtcgtattctcggtcatgaaggcatcggtattgtagaagaagtcggcgatgctgtaaaaaacatcaaagtcggcgataaagtcattatttcatgcgtcagcaaatgctgtacttgcgacaactgcaaaatccaactttattcgcattgccgcaacggcggctggattttgggctacatgattgacggcacgcaggcagaatacgtccgcacgccttatgccgacaacagcctcgtgccgctgcccgacaacgtcaacgaagaagtcgccctgttgttgagcgacgctttgccgaccgcacacgaaatcggcgtgcaatacggcgatgtcaaacccggcgacaccgtattcatcgcaggtgccgctcctgtcggtatgtccgccttgttgaccgcccaactgtatagccccgccgccattatcgtgtgcgatatggacgaaaaccgtttgaaactggcgaaagagttgggcgcgacccataccatcagccccgcttccggcgacgtctccaaacaagttttcgccatcgtcggcgaagacggcgtagattgtgccatcgaagcggtcggtatccctgcaacttggaatatgtgccaagacatcgtgaaacccggcggccatatcgccgttgtcggcgtacacggtcaatccgttgatttcaaactggaaaaactgtggattaaaaagcttgccatcactaccggcctggtaaacgccaataccaccgaaatgctgatgaaggcaatttccagcagctccgtcgattacaccaaaatgttgacccaccgtttcaaattcagcgaattggaaaaagcctacgacgtgttcaaacacgccgccgaaaatcaagcgatgaaagtggttttggaagcggattaa

SEQ ID NO: 70336 - DNA, 1332 bp, Neisseria meningitidis; identical to SEQ ID NO: 56134

SEQ ID NO: 70337 - DNA, 998 bp, Neisseria meningitidis; identical to SEQ ID NO: 56135

SEQ ID NO: 70338 - DNA, 5481 bp, Neisseria meningitidis
atgaaaaccaaacgttttaaaattaacgccatatccttatccatctttcttgcctatgcccttacgccatactcagaagcggcattggtcagagacgatgtcgattatcaaatattccgtgactttgcagaaaacaaaggcaaattttttgtcggcgcaaccgatttatcagtgaaaaacaaacaaggtcaaaacatcggcaacgcattatccaacgtaccgatgattgattttagcgttgcagatgtcaacaaacgcatagcaacggtagtcgatccccaatatgctgtcagcgtcaaacacgccaaagcagaagtccatactttttattacggtcaatacaacggtcataatgatgtagccgacaaagaaaatgaataccgcgttgtcgaacaaaataactatgaaccccataaagcttggggtgcgagcaacttaggtcgcctcgaagattataatatggcgcgttttaacaagtttgtaactgaagttgcgccgattgcaccaactgatgccggcggcggattggatacctacaaagataaaaaccgtttttcctcttttgtcagagttggcgcaggcaggcaattagtttatgaaaaaggggcttatcatcaagaaggaaatgaaaaaggctacgatttgcgcgatctttcacaagcctatcgttatgccattgcaggtacaccttataaagatattaatattgaccaaacaatgaataccgaaggtttgattggctttggtaatcacaatacacactattcagcagaagaacttaaacaagcactctcgcaagatgcgttaacaaattacggcgtgttgggcgatagcggctctccgttatttgcttttgacaaacaaaaaaatcaatgggtctttttgggaacttatgattattgggcaggttacggaaaaaaatcttggcaagaatggaatatctataaaaaagaatttgcagataaaatcaaacaacgcgataacgccggcaccatcaaaggtaatagagaacatcattggaacattacttttggcacaaacagcaagattggttctacagcggtaaggcttgccaacaatgaaagggatgcaaacaacggacagaatgttacctttgaagacaacggcactttggtattggatcaaaacatcaaccaaggcgcgggcggtctgtttttcaaaggcgattacacagtcaaaggtgcaaataatgacatcacttggctaggtgcggggattgatgttgccgacggcaaaaaagtcgtttggcaagtcaaaaatccgaatggcgacagattggcaaaaatcggcaaaggcacattagaaataaacggcacaggcgttaaccaagggcaattaaaagtcggcgacggtacggttattctgaatcaacaagccgatgccgacaaaaaagtccaggctttctcccaagtcggcattgtcagcggacgcggtacattggtattaaatagttcaaatcagattaatcccgataacttatatttcggtttccgtggcggtcgtttggatgccaatggcaatgacttgacttttgaacacatccgcaacgtggatgaaggcgcgcgcattgtcaaccacaacacagaccgcgcctccacaatcacattaaccggcaaatcattaattaccgctcctcaaaatctttctgtttatgaaatccgaaatgattacgatgatgacgattattatggctattacagctatagaaaacccattccgcaaggcaaagatctttattacaaaaactatcgttattacgccctaaaatccggcggcagcgtgaacgcaccgatgcccgaaaacggacaaacggaaaataacgactgggtctttatgggatataagcaagaagaagcccagaaaaacgcgatgaaccacaaaaacaatcagcgtattagcggttttagcggtttctttggcgaagaaaacggaaaaggacataacggcgcattaaaccttaatttcaacggcaaaagcgcgcaaaaccgtttcttgttaacaggcggcacgaatttaaacggaaaaataagcgtaactcaaggcaatgtcttgttatcaggtcgtccaacaccacacgcaagagattttgtgaacaaatcttcagcccgaaaagacgcacatttctccaaaaacaatgaagtcgtatttgaagacgactggataaaccgcacattcaaagccacagaaattgcggttaatcaatccgcatcattctcttccggcagaaatgtatccaacattaccgccaacatcaccgcaacagacaacgccaaagtaaatttgggttacaaaaacggcgatgaagtttgcgtgcgctcggactataccggttacgttacctgcaacacagacaacttatccgataaggctttaaacagctttggagcgacacagattaacggcaatgtgaatttgagtcagaatgcggcattggtcttaggcaaggctgcattatgggggcaaattcaagggcaaggaaacagcatcagcctaaaccaacatagcaaatggcatttgaccggcgacagccaagtacacaatctgtcattggcggatagccatattcatttgaacaacgcttccgacgcgcaaagtgcaaataaataccacacgctcaaaatcaatcatttatccggtaacgggcattttcattatctgacgcacctggcgaaaaatcttggggataaggtgcttgtgaaggaatccgcatccggtcattatcagctccatgttcaagataaaacaggcgaacccaatcaggaagggctgaatctctttgatgcatcatccgtacaagaccgttcgcacctttctgtttccttggcgaataaccatgtagatttaggcgcattgcgttatacaatcaaaacagaaaacggtattacccgattgtacaatccttatgccgagaaccgccgccgagtcaaaccggccccgtctcctgccacaaacacggcttctcaagcacaaaaggcaacacaaacggacggtgcacaaattgccaagcctcaaaatatcgtcgtcgcaccacctagcccgcaggcaaatcaagccgaagaagcaaaacgccaacaagcaaaagcggagcaagtgaagcgtcagcaagcagaagcagagcgtaaatcggcagagttagcaaaacaaaaagcagaagccgaacgcgaagcaagagagctggcgacccgccaaaaagcagaacaagaacgcagcagcgccgaacttgcacgtcgacatgaaaaagaacgcgaagcggcagagttgtcggcaaaacaaaaagtcgaagccgaacgtgaggctcaagcattggcggtacgccgaaaagccgaagccgaagaggcaaaacgccaagctgcagagcttgcacgccggcatgaaaaagaacgcgaagcggcagagttgtcggcaaaacaaagggtcggggaagaggaacgccgtcaaacagcccaatcccagccgcaacgccgcaaacgccgtgccgcaccgcaggattatatggcagcttcccaagaccgtcctaaacgccgcggacaccgttcggtacagcaaaacaatgtggaaattgcccaagcccaagcagaacttgtgcgccgacagcaggaagaacgcaaagcggcagagttgttggcaaaacaaagggcagaagccgaacgtgaggctcaagcattggctgcgcgccgaaaagcagaagccgaagaggcaaaacgccaagctgccgaacttgcacatcgccaggaagcagaacgcaaagcggcagaattgtcggcaaaccaaaaagccgcagctgaagcccaagcattggcggcacgccaacaaaaagcccttgcgcgtcaacaggaagaagcacgaaaagctgcagagttagccgtcaaacaaaaagcggaaaccgaacgcaaaaccgccgaacttgccaagcaaagggcagcagccgaagcagcaaaacgccagcaagaagctcgccagaccgccgaacttgcacgtcgtcaagaagcggaacgccaagcagcagagttgtcggcaaaacaaaaagccgaaacagatcgagaagcggcagaatcggcgaaacgaaaagctgaggaagaagagcaccgtcaagcagcccaatcccagccgcaacgccgaaaacgccgtgccgcacctcaggattatatggcagcttcccaaaatcgtccgaaacgtcgcggacgcagatctactctgccggcaccgccctcgccatcatttgattcgtcagcttacgcagcacccagggccttgcataatccggactggtatgaaaatgactatgaagaaatccccttggatgcgttggaagatgaaaatgtatctgaatcagttgacacatcagacaaacagcctcaagacaatacggaacttcatgaaaaatatgaaaatgattatgaagaaatccccttggatgcgttggaagatgaagatgtatccgaatcggttgacacatcagacaaacagcctcaagacaatacggaacttcatgaaaaagttgagacagtgagtttgcaaccaagagccgcgcagccgcgagcccaagccgccactcagccgcaagcccaagccgccgcgcaagccgatgcagtcagcaccaataccaactcggctttatctgacgcaatggcaagcacgcaatctatcttgttggatacaggtgcttcattaacacggcacattgcacaaaaatcacgcgctgatgccgaaaaaaacagcgtttggatgtcgaacatcggttatggccgtgattatgcttccgcacaatatcgccggtttagttcgaaacgcacgcaaacacaaatcggcattgaccgcagcttgtccgaaaatatgcagataggcggcgtattgacttactctgacagtcagcatacttttgatcaggcgagcggcaaaaatacttttgtgcaagccaacctttatggtaagtattatttaaatgatgcttggtatgtggccggcgatattggtgcaggcagcttgagaagccggttacaaacacagcaaaaagcaaactttaaccgaacaagtatccaaaccggccttactttgggcaatacgctgaaaatcaatcaattcgagattgtccccagtgcgggaatccgttacagccgcctgtcatctgcagattacaagttgggtaacgacagtgttaaagtaagttctatgtcagtgaaaacactgacggccggactggattttgcttatcggtttaaagtcggcaaccttaccgtaaaacccttgttatctgcagcttactttgccaattatggcaaaggcggcgtgaatgtgggcggtaattccttcgcctataaagcagataatcaacagaaatattcagcaggtgccgcgttactgtaccgtaatgttacattaaacgtaaatggcagtattacaaaaggcaaacaattggaaaaacaaaaatccggacaaattaaaatacagattcgtttctaa

SEQ ID NO: 70339 - DNA, 777 bp, Neisseria meningitidis
atgaatagacccaagcaacctttcttccgccctgaagtcacagttgcccggcaaaccagcctgacgggtaaagtgattctgacacgaccgttgtcattttccctatggacgacatttgcatcgatatctgcgttactgattatcctgtttttgatatttggtaactatacgcgaaagacaacagtggagggacaaattttacctgcatcgggcgtaatcagggtgtatgcaccggatacggggacaattacaacgaaattcgtggaagatggagaaaaggtcaaggctggcgacaagctatttgcgctttcgacctcacgtttcggcgcaggaggtagcgtgcagcagcagttgaaaacggaggcagttttgaagaaaacgttggcagaacaggaactgggtcgtctgaagctgatacacgagaatgaaacgcgcagccttaaagcaactgtcgaacgtttggaaaaccagaaactccatattttgcaacagatagacggtcagaaaaggcgcattagacttgcggaatcagtggcaaaaacggcactgggcagacaggaattgtcgggattgggcatggtatcctccgatttggcgaagagcagcgaacctgtttatcttgtgaaaataaaacccgacaaatcaaccatcactgcatacggtgaggaaaaaccgctgcaaatcggcatgacgttggaagcagacatcctgcacgagaaacggcgattgtacgaatgggtattggagctgatttatagtatatcgggcaaactgtaa

SEQ ID NO: 70340 - DNA, 3174 bp, Neisseria meningitidis
atgaataaaacttggaaacggcaggttttccgccataccgcgctttataccgccatattgatgttttcccataccggcgggggggggcaaacgcaaacgcaaacgcataaatacgctattgtaatgaacggacaaaagctgcccgaggtaaagtgggggactggctatagaaatttggcgcaaaaaagcaatgaacgccaatttacccatacgagtggtttcggcatcaaaaaaaacgtaactttatcattcaataataccgatgaagttgttgctcaaaaaaacggtactgtcgttttcggcgcggcgacctacctgccgccctacggcaaggtttccggttttgataccgctaagctgaccgagcgcggcaaagccgttgattggattcgtacgacccacccggggttgataggctacagctacgaaaatgtcacatgcagcaataactactacaacgccagcagcggctgtcctgaacttagctataaaacccaatttacctttggtaatcaagggttgaaaagaaagacaaacggcaggctggatatagacgaagacaaaagccgcgacggttcgcccatttacaaattgcagaattatccctggttgggcgtgtctttcaatttgagcagcgagagcctcgtcaaatcaataaaatacaataaaattatatcttcttttagcgaggacgtgacgcagagcaatggtacgaacagccaatacaaagacaaaaacctcgtttatacgacaggcgattaccagtataagaataaatattcttcccgttatgtcgggcaggacgaacactccgccgtcgccttttatctgaacgccaaactgcacctgctggataaaaaacaaatccaaaatatcgcgcaagtcagtgaacttaattttggtacgttgagaacgctcatcgagccgacggaagagtggaaaaaaaagaggacgaacttttttcaaggtggtaattggacgtttgaagataaaggagaagtcagcgtcaaactcaaattgccggaagtcaaagcaggccgctgcgtcaacaaaaataaccccaatcccaatgccaaagccccctcccccgcactgaccgcccccgcgctgtggttcggacctgtgcaaaatggtaaggtgcagatgtattccgcttcggtttccacctaccccgacagttcgagcagccaaattttcctgcaaaacctttcccgcaaggatgacacaagcaaaccgggccgctattccctcaaacccttgagtatgtcggagattaaaagtaaagagccgaatttcacagggcggcaaaccgtcatccgattggatagcggcgtacagcagatcaaacttcaaggcaatgaggtcgccaattttaatggaaatgacggcaaaaacgacactttcggcattgttagtgaagggagcttcatgcctgataccagcgagtggaaaaaagtattgctgccttggacggttcgtgcttccaatgatgacggtcaatttaacacattcaacaaagaagaaaacaacggcaagccaaaatacagtcaaaaataccgcagccgcgacagcagcaagcacgagcgcaatttgggcgacatcgtcaacagccccatcgtggcggtcggcgggtatttggctacttccgccaacgacgggatggtgcatatcttcaaaaaaggcaacggcgtggacgagcgcaactatagtctgaagctcagttatatccccggcacgatgccgcgccaatattttgataacgacacttccgctctcaaagactccacccttgccaaagagctgcgcgcctttgccgaaaaaggctatgtgggcgaccgctacggcgtggacggcggctttgtcttgcgccaagtcgaacggaatgggaaagaccatgtgtttatgttcggcgcgatgggctttggcggcagaggcgcatacgccttggatttgaccaaagccgacggcaatgacccgacaaaagcctctttgtttgatgtaaaagataacggcaataatggcaataatcgcgtggaattaggctacaccgtcggcacgccgcaaatcggcaaaacccacaacggcaaatacgccgccttcctcgcctccggttatgcgactaaaaccattgacagcacagacaataaaaccgcgctgtatgtgtatgatttggaaagcagcggtacgctgattaaaaaaatcgatgtacccggcggcaagggcgggctttcgtcccccacgctggtggataaagatttggacggcacggtcgatatcgcctatgccggcgatcgcggcggcagtatgtaccgctttgatttgaaagactggtctgtacgcaccattttcagcggcaacaaaccgattacttccgcgcccgctatttcccaactgaaagacaaacgcgtggttatcttcggcacgggcagcgatttgagtgaggaggatgtactcaatacggacgaacaatatatttacggtatctttgacgacgatacggcggcgagtaatgtagatgtaaaactcaaaggtttgggaggcgggctgctcgagcaacaccttactcaggaagataaaaccttattcctgaccgattacaagcgatccgacggctcgggcgataagggctgggtagtgaaattggaagccggacagcgcgttaccgtcaaaccgaccgtggtattgcgtaccgcctttgtaaccatccataaatatacgggtaatgacaaatgcggcgcggaaaccgccattttgggcatcaataccgccgacggcggcaagctgacgaagaaaagcgcgcgcccgattgtgccggacgccaataaggatgtcgcgcaatattccggtcataagaaaggcaccaacggcaaatccatccctataggttgtatgcaaaaaggcaatgaaatcgtctgcccgaacggatatgtttacgacaaaccggttaatgtgcgttatctggatgaaaagaaaacagacggattttcaacaacggcagacggtgatgcgggcggcagcggtatagaccccgccggcaagcgtgccggcaaaaacaaccgctgcttctcccaaaaaggggtgcgcaccctgctgatgaacgatttggacagcttggacattaccggcccgacgtgcggtatgaaacgaatcagctggcgtgaagtcttcttctga

SEQ ID NO: 70341 - DNA, 903 bp, Neisseria meningitidis
atgaatccggcaatgattgagcgtcttaaggcagtcgagaatcaggcggaagcaatggaacgcggcgcacgctctgcatatcttaagcagcaggcgcaggaattgggcatcagccttgccacgctataccgcaagctggaggcggtcagcgtcaagccgacgcgcaaacggcgcagcgatgcgggcaagacggagcttaaaccggaagaagccaaattgatttcggcggttttggtggaggcgatgaggcgcaacggcaagcggttgatgtcggtgcggcaggcggtggaaatgctgcgcgccaacggaaaaatcgaggcggcgcggattgatggggaaaccggggaagtcatcccgtccctccgcactgctttccgcccgctggcaagacatcgacctcaccgcccggttatggcacatccccgccgccgacatgaagaccaaacacccctttaccgtcccactgtcggactgggcggtagaaatactccgagagctgcacacacagaccggcgacaacatccaccttttccccggcatccgcccacggcgcaaacccgccccccatccgaccacatcagcatcaaattcgcccacaacgccatccgacgactgggctatgacggcagcacccccggcaaatccaaacacacaatgcacggattccgccacctcttcaccaacatcagcctgaccgccggaaaagacaccctcacaacagacctcgccctcggccacatcagccgcgccgccctccaacgcgccggcttctcaagcctgcaccactacctgaccgccgacagctaccgcctccaagagcggcgcgaactcgccgaatggtacagccgccgccaccgccaagcatacgaagccgccgcccaaaacacttgcaataaaacctaa

SEQ ID NO: 70342 - DNA, 1200 bp, Neisseria meningitidis
atgtggacgggatttttttcaaaatcaggcactggcattgcagaggaaaggcatcaaaaccgccgtgcttgcaccgatgttccgctacttgcggaaagaaacagcaagcatcctgaccggccttacggttttgcaaaatatcggcaaagcggtttggacatctatgcatggcacggcatatatttcttcccccgctttccgttcatcgacatcgactgcatccgctgggtgtgtgcgggtttgaaagctttcaaacactacatccgcgaaaacgggctgcccgacctgattcacgcccactgtatgaactatgccggcatacttgccttcaagatttcccaaaaatacggcatcccctatgtcgtcacgaaacacagcagcaccatcacgcgcggtctgatccgtccccaccaatggcagcctatgaaaaatgcggcggcgcacgccgccgcacgtctcgccatcagccgccatttcgcacacgtcctgcaacacaaatacggctgcgaatggcagtacctccccaacatactgggcggaatattcaaccgaccgtttgaacaaagagaaaaaaacaacaaaccgcatttcgtgttctgcaccgtctcgcaccttcgccgtctcaaaggacacgatgtcctgctcactgcctttgcccgggcgttggcacaatgcccgcaactgcgtctaaacatcggcggcagcggacaggaagaacagcggctgaaacagcaggcggcagacttgggcattacccatgccgttacatttttgggcgcattgcagcccgaagcagtcttggatttgatgaggaacagcgacgcattcgtccttgccagccgcaccgaaaccttcggcgtggtctatatcgaagcactgtcccaaggattgcccgtcattgcaacacgctgcggcggtgcggaatctattgtttcagacggcaacggatatttggttcctgttgacgacgacgatgcccttgccgacgcactcatcaaaatgtatgaacaccactctgattttgaacctgcccgacttagggaaaactgtctgaacgaatttggcgaaaatgccgttataggcaggttgatcggcattttccgacaggcaatcgcagaatacggtaagaaaataccggtgaaatatagtggattaacaaaaatcaggacaaggcgacgaagccgcagacagtacaaatag

SEQ ID NO: 70343 - DNA, 1011 bp, Neisseria meningitidis
atgattttctccatcatcgtccctatttacaatgtggaaaaatacctccgctgctgcgtggattccgtgcttgccgaaaattttgccgattatgaaatgattttggtcgatgacggttcgccggacggctgcgggaagatttgcgacgaatatgcaggcaaatatccgcatataaaagtgattcatcaagaaaacggcgggctgtcggatgcccgcaacgccggtatccgggcggcaaaaggcgattacctaatctttttggacagcgacgattattgggccgataccaaccgttcaaaaaacgggggggggattctctttgatttacaacaacttgcagacaaaaaggttgatttgatcctgcatccctcgtccctcaattaccacgtcatccccaaaggggcggacttttcggataatgattttgtccgccattttgaaacgttggtggaggggcggtactatatcgccaacgcgtggacaaaaatcgtcaggcgggaaataatcatcaaaaacaatctgtttttcccaaaaggatacattcacgaggatttcccgtacagtttgaaattggcgcgttttgtcaagacttttgccttttacgataaccctttttatcaataccgcgttctcggcaactctatcagccacaacgtcaaatacaaaaatttcagcgatatgctggcgcatctcgaccggggtgtggattttttagtcgaaaacaaaaattcccccatctacggcggtttgcaaaaatttgtcttcgacaatatcggctatctgaggtctatattggtaaggctttatttttccaaaaacattatcctcatctaccggaaatatttttcatttaaagaaaaatgcagaaagatattcggcgcgaagacaatccgtccggtttttatcgggaagaccgcattcatcataggattgccgatattgcgcctgctcgtaccgcctatgctgtacccggcaatcaaggccgtttatcagaaatttttttcggaataa

SEQ ID NO: 70344 - DNA, 3126 bp, Neisseria meningitidis
atgaataaaactttaaaaaggcgggttttccgccataccgcgctttatgccgccatcttgatgttttcccataccggcggggggggggcgcaggcgcaaacccgtcaatacgctattatcatgaacgagggaaaccagcccgaggtacagtggaatgggtcatattcaataaaggacaaagacaggaagcgcgaatatactcatcataatcactcacgaggaggaagctctgtctcattcaacaatagcgatgagcttgtttctcaacaaagcggtactgccgtttttggcacagccacctacctgccgccctacggcaaggtttccggttttgatgccgacgggctgaacaagcgcggcaatgccgccggttggattcgtaccacccgcatcgcgctggcaggctacagctacgaaggtgtcgtatgcagaagcggcacaggctgtcccaaacttgtctataaaacccgattttccttcgataatcccgacttggtaaaaaatgcgggcaggctggataggcacacagacccaagccgcgaaaattcgcccatttacaaattgaaggattatccatggttgggcgtatctttcaatttgggtgccgagggtaccaccaaagatggtaagacaatcaacaaattggtatcttcttttgatgaaaagaatagtagtaataacaacctcgtctataccacggaaggccgcgatatttccttgggcgactggcagcgcgaaaagaccgccatggcctattatctgaacgccaaactgcacctgctggacaaaaaagggattaaagatatcaccaacaaaacagtgcagttgggtgtcttgaggccgagcatcgatgtgcggctgcaaagaaatacggggcttgccggcttgctaaatttttgggctagttgggacattaaagataacgggcagattccggtcaagctcggcctgccggaagtcaaagcaggccgctgcatcaacaaagcgaaccccaatcccaaagcccaagccctttcccccgccttgaccgcccccgcgctgtggttcggagctgggcaagatggtaaggcggagatgtattccgcttcggtttccacctaccccgacagttcgagcagccgcatcttccttcaaaatctgaaaagaaaaaacgaccccaacaaacccggccgctattccctcgcagacttgagtgcgtcggatattcaaagtaaagagccgagtttcacaagtcggcaaacaatcatccgattggatggcggtgtacatgagatcaaactggatagaagcaatgaggccaccggtttaaatggaaatgacggcaaaaacgacactttcggcattgttagtgaagggagcttcatgcctgataccagcgagtggaaaaaagtattgctgccttggacggttcgtgcttccaatgatgacggtcaatttaacacattcaacaaagaagaaaacaacggcaagccaaaatacagtcaaaaataccgcagccgcgacagcagcaagcacgagcgcaatttgggcgacatcgtcaacagccccatcgtggcggtcggcgggtatttggctacttccgccaacgacgggatggtgcatatcttcaaaaaaggcaacggcgtggacgagcgcaactatagtctgaagctcagttatatccccggcacgatgccgcgccaatattttgataacgacacttccgctctcaaagactccacccttgccaaagagctgcgcgcctttgccgaaaaaggctatgtgggcgaccgctacggcgtggacggcggctttgtcttgcgccaagtcgaacggaatgggaaagaccatgtgtttatgttcggcgcgatgggctttggcggcagaggcgcatacgccttggatttgaccaaagccgacggcaatgacccgacaaaagcctctttgtttgatgtaaaagataacggcaataatggcaataatcgcgtggaattaggctacaccgtcggcacgccgcaaatcggcaaaacccacaacggcaaatacgccgccttcctcgcctccggttatgcgactaaagaaattaacagcacagaaaatcaaaccgcgctgtatgtgtatgatttggaaagcaacaacggtacgccgattgcaacaatcaacgtacccgacggcaagggcgggctttcgtcccccacgctggtggataaagatttggacggcacggttgatatcgcctatgccggcgatcgcggcggcagtatgtaccgctttgatttaagcggcaacaacccgaccagttggtctgcacgcgccattttcagcggcaacaaaccgattacttccgcgcccgccatttcccaactgaaagacaaacgcgtggttatcttcggcacgggcagtgatttgagtgaggatgatgtactcagtacgagcgaacaatatatttacggtatcttcgacgacgatatggtggcgaataacgtaaatgtaaaactcagcggtttgggaggcgggctgctcgagcaacaccttactcaggaagataaaaccttattcctgaccgattacaagcgatccgacggctcgggcgataagggctgggtagtgaaattggaagccggacagcgcgttaccgtcaaaccgaccgtggtattgcgtaccgcctttgtaaccatccataaatatacgggtaatgacaaatgcggcgcggaaaccgccattttgggcatcaataccgccgacggcggcaagctgacgaagaaaagcgcgcgcccgattgtgccggacgccaataaggatgtcgcgcaatattccggtcataagaaaggcaccaacggcaaatccatccctataggttgtatggaaaaaaacgggggaaccgtctgcccgaacggatatgtttacgacaaaccggttaatgtgcgttatctggatgaaaagaaaacagacggattttcaacaacggcagacggtgatgcgggcggcagcggtatagaccccgccggcaagcgtgccggcaaaaacaaccgctgcttctcccaaaaaggggtgcgcaccctgctgatgaacgatttggacagcttggacattaccggcccgacgtgcggtatgaaacgaatcagctggcgcgaagtcttcttctga

SEQ ID NO: 70345 - DNA, 2166 bp, Neisseria meningitidis
atgaagacagacattcaaaccgaattaacccaagccctactaccacacgaaaaagtatgggcgaacgaagaaaaaaccattttagccaaaaacattctgttggatttggtggaaaaaaccgacccgaccattatcggtttgttattgaataatgatgagttaaaacgccatttctttgtggaagtgaatggtgttttggtgtttaaattgcaggatttacgttttttcttggacaaacacagcgtcaataattcctacacaaaatacgccaaccgcattggtttgacggacggcaaccgctttttgaaagacaattcggatattgtgttggattttccgtttaaagattgcgtattgaatggcggacaaagcaccgaagaaggcgaagagatttattttaaacgcagtaatagccagccagccagccagccagccagccagccagccagccagccccaattatacactaaattaacccgaaaaagacaagaaatcttttttaatcaaacgcttgcttttgatgaaatcgatcggctttttgacgcaaaagcattctcaaaattctctcgctataccgcagacggcaaacaagcggttggcgaaatcaaacgtcattcagacggcacacccgccgaaaatctcattatcaaaggcaataatctgatagccctacattcgcttgccaaacagtttaaaggcaaagtgaagttgatttatattgatccgccttattattttgttaaaaagaaacaacaagatagttttggttataacactaactttaaattatctacttggcttacatttatgaaaaatcgtttatcaattgccaaagaattattaactgatgatgggattattgttatttccattgatgatgacggaaatgcttatttaaagattttgttagatgaaatttttggatttgaaaattttatcggaaatttacccactattatgaatttaaaaggtaataatgatgaatatgcttttgcaggcactcacgaatacacactagtctttgctaaaaataaagataaatctactttttatgaatttccaatagatgaagataattttttagagaaatgggaagaagatgaaattgggttttataaaaaaggagctccaatgcgagcaacaggaaccgaagataaaagagaagatagacctgaaatgttctatccttttttggtaaaaaataacacagttagtacaattacagatgaagaattttctcaaatctataataaagatttagaagtattcaatgatgattttattcaaaaactaaaagagaaatacgaaaatcttggatacaattttattttacctattgctgataaacaatgggggcgttggcgttgggggtattcaataaagaataaggcaaggctgcagacggatattattgttagccaatctaaaaatggaatttccttgtataaaaaacaaagacctgaattagatgatttacctacaaaaaaacctaaaactattttttataaacctgaatacagtagtggtaatggaactgaacagatgaaaaatctttttggtgaaaaggcatttaaaaatcctaaaccagaagaacttatccaagattttattaccatcacaaccaacgaatccgacatcgtcttagactaccatcttggtagtggcacaaccgccgccgttgcccacaaaatgaaccgacaatatatcggtattgaacaaatggattatattgaaacgcttgccgttgaacgcttgaaaaaagtgattgatggcgagcaaggcggtatttccaaagccgtgaattggcaaggtggtggcgagtttgtttatgccgaacttgccccatttaacgaaaccgcaaaacaacaaattttggcttgcgaagattcagacggcatcaaaacgctgtttgaaggtttatgcgaacgctatttcttgaaatacaacgtcagcgtaaatgaatttagtcaaatcattcaagagcctgaatttcaatctttgccattagacgaacaaaaacaaatggtgcttgaaatgttagatttaaatcaaatgtatgtttcattatccgaaatggacgacgagcaatttgcagattgcctgaacgatgacgataaagcggtaagccgtgcgttctatcaagcggagaaaaaaaatggcgaataa

SEQ ID NO: 70346 - DNA, 1530 bp, Neisseria meningitidis
atggtgatttccaacccccgcgaacttgaaaaactcaaagaccggattcccaatctgatcaacatcatccgcgtcgccatcgtttttccgctgatgattatgcacatcctcgggctggaaaccggcagccgtgcgaacctgcacgcttcgtggacggcgtgggcgttttatgtttggctcgccattgcctgctggctgattttcttttccatcatccatccgcattggcaatggcagtcgctgaaaatgccgcgtttcagcgcggtggcggacatcacgatgatcggcgtgctgacctacctgtttggcggcatcgattccggcttcggcatcctgatcctgcccttcgtcgtctgctcctgcctgctcagctacgggcgttaccccctgctctattccagctacgccgccatcctgctgatattcaacgccattgccgacggcgatatcggcaaatacccgctcatatcggatgcccgaaccgcctcggtaaccttcatccttgtcgccgcctcctatctttccgccatcttcacctcactgtcggtcagatacatcgacagcgccggccggctggcacgcgacaaccacctcgcctaccggcgcatcaaaggcttgagccaaaccgtactcaaccgcgttcaggaagcggtcgtcgtcatcaacgtcgagcatcagaccatactgttcaataaaaaggcaaaagacctgctacccatgcttgaaatcggacagcatactgccctgttcgaccctattaccgttttatgggacaaggcctcttcgcgtactttcgaacgcaatatcgacacgcccggcctgaacgccggcatccgcgccgttccggtcaacaaagggccggacaagctgctcatcctctacatccgcccgcaaagcgaaattcaggcagaagccctgtccgtcaaacttgccgcgctcggacaactgaccgccaacctcgcccacgaaatccgcaacccgatgtccgccatccgccacgccaacgacctgctgcgcgaaaatatggaagcgggggcggcagatccgttcaacgccaaattgtgcaaaatcatcgacggcaacgtctgccgtatcgacaaaatgctcgaagatatttcctcgccaacaagcgcaacaaaaccgaacgcgaaaccatcggcctgataccgttttgggaagaattcaaacaagagttcctgctcggccatcccgatgccgccggctgcatccgcctagatatgcagggcaatcacctgactgcctatttcgatcctgcccacctgcggcaaattatgtggaacctcgccaacaacgcgtggcggcacagcagcaaacgtaacggctcgattgccgtcgtcgcccgtcctgcacaaaaaaacaccatcagcatcctgtttgccgacgacggcggcggcgttccgcccgaagtgcaggaacacttgttcgaacccttttacaccacagcaaaaaacggaaccggcttgggactgtatgtcgcccgcgaactggcacacgccaatttcggcgatt

SEQ ID NO: 70347 - DNA, 735 bp, Neisseria meningitidis
atggcttcgcataatactacacatcagatgaaaacgctgtgttcttcctgttctttgcgggaactctgcctgcctgtcgggctgctgcccaacgagctcagccaactcgatgccgtcatccgtcaaagccgccgcctgaaaaagggcgaatacctgttctgtgtcggcgaagcccttacctcgctctttgccatccgttcgggcttcttcaaaacaaccgtcgccagtcaggacggccgcgatcaggtaacgggtttctttatgtcgggcgaactcatcggcatggacggcatctgttcccatgtgcacagttgcgacgcggtcgccttggaagacagcgaagtgtgcgaactgccgtttacccacatcgaagaactggggcagaatatccccagcctgcgtacccactttttccgcatgatgagtcgtgaaatcgtgcgcgaccaaggtgttatgctgctgttgggcaatatgcgcgccgaagagcggattgccgcctttctgttgaacctttcccaacgcctttattcccgaggttttgctgccaacgacttcatcttaagaatgtcccgcgaagaaatcggcagttatctcgggctgaaacttgaaaccgtcagccgcacattatctaaatttcatcaggaaggattgatttccgtcgaacacaaacacatcaagatcctcaatctgcaggtgttgaagaagatggtatccggttgttcgcacgccatttga

SEQ ID NO: 70348 - DNA, 630 bp, Neisseria meningitidis; identical to SEQ ID NO: 56153

SEQ ID NO: 70349 - DNA, 1143 bp, Neisseria meningitidis
atgaaaaaatccgtattagccgttttggccgcgctgtctctggcagcctgcggcggcagcgaaaaaaacgccgtgcaacctcaagcagacgctgcgtctgctgccaatgccgaagccgctgccaccgatactctgaacatctacaactggtcgaactatgttgacgagagtacggtcgaagactttaaaaaagccaacaatctgaagctgacttacgacttgtacgaaaacaacgaaacgctggaagccaaaatgctgaccggcaaatccggttacgatttggttgtgccgggcatcgccttcctgccgcgccaaatcgaggcgggcgcgtatcaaaaagtcaacaaagacctgattcccaactataaaaacatcgatcccgaactcttgaaaatgctggaaaccgccgacccgggcaaccagtatgccgtcccctatttctccggcgtgaacacgattgcgattacggcgaaaggcaaagagcttttaggcggcaagctgcccgaaaacggctgggatttgctgttcaaacccgaatacacccacaagctgaaatcctgcggcatcgccctgtgggacaccccgagcgaaatgttcccgattttgctgaactacttgggcaaagaccccaaaggttcgaatcctgaagatttgaaggcagcggcggaagtgttgaagtctatccgtccggatgtcaaacgtttcagcccgtccatcatcgacgagctggcgcgcggcgacatctgcctggcggcaggcaacggcggcgatttgaacttggcgaaagcacgttccgaagaagtgaaaaacaacgtcggcatcgaagtgctgaatccgaaaggcatgggcttctggattgagtcttggctgattcccgccgatgcgaaaaacgtcgccaatgcccacaaatacatcaactacacgctcgaccccgaaatcgcggcgaaaaacggcatcgccgtaaccttcgcccccgccagcaaaccggcgcgcgaaaaaatgcctgccgagctggtgaacacccgttccatcttcccgaacgagcaggatatgaaagacggttttgtgatgccgcaaatgagtacggatgcgaaaaaactgtctgtcagcctgtggcagaaaatcaaagtcggcaccaactga

SEQ ID NO: 70350 - DNA, 1368 bp, Neisseria meningitidis
atgtcttccccttcaaataccaatcgtcaaacctgatccagccgattaacctatatcctgactgttgccggcgcgactgtcggcttcggcgcgacgtggcgtttcccgtatttggtcggtgaaaacggcggcggcgcgtatgtgtttttattctgtatcgccatgctcgttatcggcatcccgatgattttggtggaaaacgtcatcggacggcgcaaaggcgtgaacgcgctggatgcgttcggcggtccgatgaacggcaaacccattgctaaaatttggaaactggtcggctggatggggctgctcggcgcgttcggcatcatggcttattacatggcactcggcggctgggtaatcagctatatcgttaatattattggaggaaatttgaatatttccagccccatcgacggtgtggttacaaaaggcttctttgccgaacacataaacagcccttgggaaattgcgttttatacgctgctttttgtcgccgtgaaccaatggattttggtcaaaggcgttatcggcggcattgaaaaagcggcaaaatagctgatgccgctgctgtttttgttcctaatcgcgatggtcgtccgcaacgttacccttccgggcgcaatggaaggggttgctttctatctgaaacctgatttcagcaagattaccgccgaactgttcgtcttcgttttggggcaggtattttttgccctgagcctgggtttcggcgtgatgattaccttgtccagctatttggataaaaacgaaaatctggttcagacggcagttatcacggcaattaccaataccatcatcgccatacttgcgggctttatgattttcccgtcgctcttcagcttcggcgttgcccccgattccggcccgactttggtattccaaagtttgccgattgtgttctcgcatatgtgggcaggatctgtgttcgccgtcattttcttctcgctgctcctgattgccgcgttgacaacttcgctgaccatttatgaagtgttgattacgaccattcaggaaaaaaccaaaatccgccgtaccgccgcgattacgattgtattggctgccatcttcattttcggcaacatcccgtccattctgagctatggtccgtggaaagacgtttccgtgttcggcaaaaatattttcgatgccttcgactacatcagcggcaacatcttgtttatgctgaccgcgctcggttccgcgctgtttgccggttttgtgatgaaggacgaagcgaaggacgaattgctttataaaggcaaccatacgacggtcaatatttggtttgcttatgtgaaatatcttgtgccgctggtgattctgctgattttcgtcagcaacctgttctaa

SEQ ID NO: 70351 - DNA, 513 bp, Neisseria meningitidis; identical to SEQ ID NO: 62220

SEQ ID NO: 70352 - DNA, 1347 bp, Neisseria meningitidis
atgagccaagccttaccctaccgcccggacatcgacacattgcgcgccgccgccgttttgtccgtcatcgtgttccatatcgaaaaaaattggctgccgggcggatttctcggtgtcgatatattctttgtgatttcaggctttttgatgacggagatcctccttcgcgaaatgtcgggggggaggttttccctgaaggcattttatatccgccgcatcaagcggattctgcccgcatttttcgccgtattggcggcaacgctggcaggcggcttctttttattcaccaaagatgatttctttcttttgtggaaatccgcgctgaccgccttgggtttcgcctctaacctgtattttgcaagggggaaggattatttcgatcccgcgcaggaagaaaagcccctgctgcacatctggtctttgtcggtcgaagaacaattttactttgtctttccgatactgctgctgcttgtcgcccgcaaaagcctgcgcgtacagttcggcttccttgccgcactgtgtgccttaagccttgccgcctcctttataccttccgcgctcgataaatattacctgccccacctgcgcgcctgcgaattactgataggatcgctgaccgccgtgtggatgcggtaccggcaacagcggaatctcgccgtcgggaaacggtatgccgccgtcggcgcattgttttccgcgtgcatactgtccgcctgcctgtttgcctattcggaacaaaccgcctatttcccaggccccgccgctttgattccctgtctggctgttgccgcgctgatttatttcaaccattacgaacacccgcttaaaaaatttttccaatggaaaatcaccgttgccgccggtttgatttcctattcgctttatctgtggcattggccgatattggcctttatgcgctatatcggcccggacaacctgccgccttattcgccggcggcagcgatcgtcctgactctagcgttttccctgatttcttatcactgcatcgaaaagccgtttaaaaaatggaaaggttcgttcgcacaatccgttttatggatttatgccttgcctatgctcattttgggggcgggctcgtttttcgcgatgaggctgccgtttatggcgcaatacgaccgcttggggctgacgcgttccaacacctcctgccacaacaataccggcaaacaatgcctatggggggatacggaaaaacagccggaactgctggttttgggcgattcccacgccgaccattacaaaacattcttcgatgccgtgggcaaaaaagaaaaatggtccgccacaatggtttccgccgacgcttgcgcctatgtggaaggctga

SEQ ID NO: 70353 - DNA, 978 bp, Neisseria meningitidis
atgcaagaaaacccgaccgtgtggctgttcgacctcgacaacacgctgcacgatgccgacgcaggcatcttcacactcatcaaccgcgctatgacacgctatatggcacgccgcctcaaactctccgaatccgccgcgtccgacctgcgtcaggaatattggcaccgctacggcgcaacgctcgccggactgcaaatccaccatcccgaaatcgacatcgccgaatttttacgcgaaagccatccgatcgatgcaatcctgaccaagctgcacggcatggcggatacggaacacaccctatgccgtctgaacgggcgcaaggcggttttttccaacggtccgtcgttttacgtccgtgccgttgtcggcgcactcggtttggaaaaccgtttcgacgcactgttcggcacggatgatttcggactgctgtacaaacccaatccgcaagcgtatctcaatgtctgccgccttttggacgtaccgcccgaatgctgcattatggtggacgacagcgcggacaacctgcatcaggcaaaagcattgggcatgaaaaccgtctggttcggtgcaaaatcccacgcgctgtcctttatcgacgcctgcgcacgcgatatggcgcaactggctcggtatgcagaaactttgtcagaacaccgccaaactcattacaataccctctaaatcctgaaaatacgaaagaaaaccatgcgtaaaaccttccttatcctgatgaccaccgccgcccttttgtcgggctgcgcgtgggaaacttatcaagacggcaacggcaagaccgccgtccgtcaaaaatatcccgccggcacgcccgtttattaccaagacggcagctactcgaaaaatatgaactacaaccaataccgtcccgaacgccatgccgtgttacccaaccaaaccggcaacaacgccgacgaagagcatcgccaacactggcaaaagcccaaatttcaaaaccgataa

SEQ ID NO: 70354 - DNA, 1119 bp, Neisseria meningitidis; identical to SEQ ID NO: 39438

SEQ ID NO: 70355 - DNA, 280 bp, Neisseria meningitidis
atgattcacgaagaaatctccgccatgcctatgggctatgaaaccttgatcggcgatatgggcagcgcactgtcaggcggacaaaaacaacgcatcgtattggcgcgggccttaatattgcgaaccgaaaatcctatttttagatgcagcgaccagccatttggatattgccaatgaaaaagcagtcaatgcaaacttgaatggcttgtctatcataaaaattatggcggcacacagaaaggaaacggtggaatcagcagataggaaaatgtctttagga

SEQ ID NO: 70356 - DNA, 1677 bp, Neisseria meningitidis
atgtcccaacaatacgtctattctatgctgcgcgtgagcaaggttgtgccgccgcagaaaaccatcattaaagatatttccctttctttcttccccggcgcgaaaatcggcctgctcggtttgaacggcgcgggtaaatctactgtactgcggattatggcgggcgtggataaagaatttgagggcgaagccgtgccgatgggcggcattaaaatcggctatttgccgcaagagcctgagcttgatcctgagaaaaccgtgcgcgaggaagtggaaagcggtttgggcgaagtggctgccgcacaaaaacgtttggaagaagtgtatgccgagtatgccaatcctgatgcggattttgacgcattggcggaagaacaaggtcgcttggaagcgattatcgcggcaggttcgtccacgggcggcggtgcggaacacgaactggaaatcgccgccgacgcgctgcgcctgcctgattgggatgccaaaatcggcaatttgtccggcggtgaaaaacgccgcgttgccttgtgcaaactcttgttgagcaaacccgatatgcttttgctggacgagccgaccaaccacttggacgcggaatctgtcgagtggctggagcaatttctcgtgcgcttccccggtacagtcgttgcggtaacacacgaccgctacttcctcgacaacgccgccgaatggattttggaactcgaccgcggccatggtattccgtggaaaggcaattactcgtcttggctggagcagaaagaaaaacgcttggaaaacgaggcaaaatccgaagccgcgcgcgtgaaggcgatgaagcaggaattggaatgggtgcgccaaaatgccaaaggccgccaagccaagtccaaagcgcgtttggctcgttttgaagaaatgagcaactacgaataccaaaaacgcaatgaaacgcaggaaatcttcattcccgtcgccgagcgtttgggtaacgaagtgattgaatttgtgaatgtttccaaatcgttcggcgacaaagtgctgattgacgatttgagcttcaaagtgcctgcgggcgcgattgtcggcatcatcggtccgaacggcgcgggtaaatcgacactgtttaaaatgattgcgggcaaagagcagcccgattctggtgaagtgaaaatcgggcaaaccgtgaaaatgagcttgattgaccaaagccgcgaaggtttgcaaaacgacaaaaccgtgttcgacaacattgccgaaggtcgcgatattttacaggtcgggcagtttgaaatccccgcccgccaatatttgggacgcttcaatttcaaaggcagcgaccaaagcaaaatcacggggcagctttccggcggcgaacgcggacgtttgcacttggcaaaaaccttgttgggcggtggcaatgtgttgctgctggacgaaccgtccaacgacctcgacgtgggaaccctgcgcgcgttggaagacgcattgctggaatttgccggcagcgtgatggtgatttcgcacgaccgctggttcctcgaccgtattgctacgcatatcttggcttgcgaaggcgactccaaatgggtgttctttgacggcaactatcaggaatacgaagccgacaagaaacgccgactcggcgaagaaggcacgaaaccgaaacgcatcaaatacaaaccggtaacgcgttaa

SEQ ID NO: 70357 - DNA, 630 bp, Neisseria meningitidis; identical to SEQ ID NO: 44175

SEQ ID NO: 70358 - DNA, 423 bp, Neisseria meningitidis; identical to SEQ ID NO: 44041

SEQ ID NO: 70359 - DNA, 267 bp, Neisseria meningitidis; identical to SEQ ID NO: 40064

SEQ ID NO: 70360 - DNA, 462 bp, Neisseria meningitidis; identical to SEQ ID NO: 43699

SEQ ID NO: 70361 - DNA, 291 bp, Neisseria meningitidis; identical to SEQ ID NO: 62229

SEQ ID NO: 70362 - DNA, 372 bp, Neisseria meningitidis; identical to SEQ ID NO: 38046

SEQ ID NO: 70363 - DNA, 291 bp, Neisseria meningitidis; identical to SEQ ID NO: 39870

SEQ ID NO: 70364 - DNA, 384 bp, Neisseria meningitidis; identical to SEQ ID NO: 62231

SEQ ID NO: 70365 - DNA, 234 bp, Neisseria meningitidis
atgcgtattttggatatttttaaaaacccggcgacaggcaatgtgtcgcactcgaagctgtgggcaaacgtcgcctgcgcggcggggacgtttaaatttgtgatgttgcccgacccgtcggcggagatttgggcggtgtatttgggcattgtcggcggctatgccgtggcgcgctcgtttgtcagcgtcaaacgtcaggaggtcgagaatgaatctcgtgaaactgctggcgaa

SEQ ID NO: 70366 - DNA, 234 bp, Neisseria meningitidis; identical to SEQ ID NO: 70365

SEQ ID NO: 70367 - DNA, 201 bp, Neisseria meningitidis; identical to SEQ ID NO: 40425

SEQ ID NO: 70368 - DNA, 192 bp, Neisseria meningitidis; identical to SEQ ID NO: 48049

SEQ ID NO: 70369 - DNA, 192 bp, Neisseria meningitidis; identical to SEQ ID NO: 60474

SEQ ID NO: 70370 - DNA, 420 bp, Neisseria meningitidis
atgtctttcggctatttgattgcaacatcgcaaccttgcgaattgttgacaaaatctcgaggtgaaactttttctttaattatggataagatggatttatggatttatttcagattttgtgaaggaaatatttatacaataaggaagaatgaaactgaatcttgtcttacagaaagaggaggcgaatggttgaaacatatttatgaatttaatcggggaagttttattttttcttatgtgcttctaaaaaagagagaaagcgaagagaattttgcagaaattgttttaaaatcaataaaaaataataaaattttgacagttaaggtacggtcaggcttgcattttgacttaaggaatatttatcgtattgagatgtatagcggattaaatttaaaccagtacggcgttgcctcaccttag

SEQ ID NO: 70371 - DNA, 240 bp, Neisseria meningitidis; identical to SEQ ID NO: 64256

SEQ ID NO: 70372 - DNA, 241 bp, Neisseria meningitidis
atgcagggatgcaatcactacatctttttattccgtaagcatttatgactttacggtcaactgctactctatgtgcctagcttttcagctccctattttcgaatattggacgaggcattttcatcagtgtcgtaatgccggccgaaaccctcacaaaccatattggttcttgtggcagcaacacctatccgtttgttcaagcgaccacaagagtaacatgattggctggtggcattggctt

SEQ ID NO: 70373 - DNA, 201 bp, Neisseria meningitidis; identical to SEQ ID NO: 62243

SEQ ID NO: 70374 - DNA, 192 bp, Neisseria meningitidis
gtgaagcataagctcgcgtcttggtggaaaaccatcaagctgacggcaaacttgatggcaggcgtgcctgattatgaaaactacgttgcacagcagcgcaaacataatcccaacgcccccgtgatgaccaagctgcaatttcaagactactgccgcaagcgccgttgcggcgcaaacggcggacgctgctgt

SEQ ID NO: 70375 - DNA, 444 bp, Neisseria meningitidis
atgaagtggttattaaatatgataatgagacctattaaatttattatggtaaatacgttattatttattgttatatgtagttcattttttgatctgctcgttcaattatgtacaattttatttcatagccaaaaaatatactttattacattatttttattatttatttttaattttgttacaaaatctatctatatggcaattatttatcctattttatatttttttacgataaaaaaatattatccttactctaggaaagtgataattctattattattagcattatctatatattttagttttatggacttttactttttttccatatattcagataaccttagctatgaaacggagcctttacatttatacatccctattattattaattttttctcacttttagtttctaattttattttatcttttatcaacaagtaa

SEQ ID NO: 70376 - DNA, 219 bp, Neisseria meningitidis; identical to SEQ ID NO: 36470

SEQ ID NO: 70377 - DNA, 123 bp, Neisseria meningitidis; identical to SEQ ID NO: 48059

SEQ ID NO: 70378 - DNA, 815 bp, Neisseria meningitidis; identical to SEQ ID NO: 62247

SEQ ID NO: 70379 - DNA, 342 bp, Neisseria meningitidis
ttgcgtactcactttgtcatttccaatgttccaagtacacctactacgataagaggaagagagcttgaaggaaaacttattttagaagttcctgctcaggtcaatccaattccacaatctgtattaagggcggcacaagaagaaaatgttatcattagagatacaacaggaaggatttacaataggtggtggtttagtattaggtggttgtgcaggtgcacatcttgcaagaaaagaaccattgatactaacagggaaaacaggggcaggtgcgtcagcaattgcaaatgcaagcattggatatcaatggactgtcaatttgtcagagccaaaagaaggagc

SEQ ID NO: 70380 - DNA, 303 bp, Neisseria meningitidis; identical to SEQ ID NO: 56191

SEQ ID NO: 70381 - DNA, 372 bp, Neisseria meningitidis
atgattattcaaaatgaatttaatttatatcctagtaatatgcttcctgaaaggttttgttatcctgaaaagtatgttcgtatctctaacgatacatctttaataccttatattcagccacataattttcactggtggtttgagaattatggaacagaaggggcagaagtagcttatatatttagaaattctatcctgcctgatttaaatcttatcccattcgctagtaatggagaatgggaagcttattttgatggtaatgatgtaacaggaaattctagggttattgtcattaatttagataatatagaaaaccatgaattttttaatagttttgaagattggcttgaattagcaattaaggatacttgg

SEQ ID NO: 70382 - DNA, 303 bp, Neisseria meningitidis
atggctaagaaagcacttattaatcgtgatctgaaacgtcaagctttggctaaaaaatatgcggctaaacgcgcggcaattaaagcggtaatcaatgattcgaatgcaactgaggaagagcgttttgaggctcgtttgaggtttcaatccattcctcgtaatgcggcacctgtgcgtcaacgtcgtcgttgtgctttgacaggtcgccctcgtggtactttccgtaaatttggtttgggtcgtattaaaatccgtgaaatcgccatgcgtggcgaaattccgggtgttgttaaagccagctgg

SEQ ID NO: 70383 - DNA, 222 bp, Neisseria meningitidis; identical to SEQ ID NO: 61637

SEQ ID NO: 70384 - DNA, 219 bp, Neisseria meningitidis; identical to SEQ ID NO: 62250

SEQ ID NO: 70385 - DNA, 213 bp, Neisseria meningitidis; identical to SEQ ID NO: 62251

SEQ ID NO: 70386 - DNA, 114 bp, Neisseria meningitidis; identical to SEQ ID NO: 50896

SEQ ID NO: 70387 - DNA, 183 bp, Neisseria meningitidis
gtgccggaacaggcacgcgcccgcccgattcaaaccgcgatgacgctttgccgccggttcggggcaggatggcggcacacgcgccgtctgccgcgtttcatttcacaccgctcttccgaaacccgagacccgcccggtccgacgtgcggtatgaaacgcttaagctggcgcgaagtcttttac

SEQ ID NO: 70388 - DNA, 660 bp, Neisseria meningitidis
atgggcaggcatttcgggcgcaggcgttttttgacagttgccgccgttgcggcggcgggcgcggcggtttcttttttgccgaatccttttgccgccgatgatgaaaaacgcaataaagatgaaaaacacaatgaaaatgtgtttttctggaaaggtgtcgcgctgggttccggtgcggagctgcgtctgttcggcgtggacgacagacaggcggcggatttggtcaataaggttttggcggaagtggcgcgtttggaaaaaatgttcagcctttaccgtgaagacagcctgatcagccgcctgaaccgtgacggttatctgacttcgccgtcggcggattttttggaactgttgagcctgtgccgcgatattcacgcgctgacggaaggcgcgttcgatccgacggttcaggttttgtggaaactgtatgccgattatttttccgcccatcccgatgcggaaacgccgccgccggagaatagcgtgaaggaagccctgaagcgggtcggcttcggcaaagtctcgtttgacgaccgtgaaatccgttttaccgaaaagggtatgggtttgtccttgaacggcatcgcgcaaggctatagtggattaacaaaaaccagtacggcgttgcctcggcttagctcaaagagaacgattctctaa

SEQ ID NO: 70389 - DNA, 225 bp, Neisseria meningitidis; identical to SEQ ID NO: 62254

SEQ ID NO: 70390 - DNA, 2079 bp, Neisseria meningitidis
atgggcaaagccaacgcctttaccgcgccgattaccgtcgtcaactacgacgaacaagccctcaacaacaccgaagcgcgtactttggtggatgccgtagcgaaaaaagacgcttccgtttggcagttcggcggagaaagcaacacgctgactggactgtatttcagaggttatcagcttgatgcgcgccaattcagcgtcaacggtttggcaggtatgtacggcacgcaaggcacggccagcgtgcaagtcggctccgcacaactgattaaaggcgcgtccaccgccgtaaacggcatgaaccctgaaggtgcggtatccggttccgtcaatatcgaaaccaaaaaagccgccgatgaaggcaaccgcaaaatcggtttgggccggtttagcaacaaccgcgcccaaggtacgttcgatttgggtcaacgcttcggcgaaaacaaagcattcggcgtacgcgccaacggcaaactgcgccacggcgacactccgcgccacggttacagcgaagacaacaaagaatttgcggtaaatgccgactatcgcggcgaaacactgcgcgtagcgttcgattccatctacgcaaaacgcaaaaccaacggcggtcgcgcgcgtatgcaggacattcaaaacgccggcggacgcttgtttggcgcgcccgatggtaaaaccaacctgctgccttcttggaactggcaaaataccgccggccaaaccaatatgcttacgtttgaatgggatgcgtttgataatgcacagattacaggcggtatcggctacaacaaggcacgctattacggcacgctgatttccccgaccgtatgtttgaatgctaccagcacttgtaccgatatgcaaaacacaaacgccagcggcaaagtaacggcacgcaactatgactacaataccggtactgcgcgcctgaccgaccaatacttccgcactttaagcatgaacctgtctgcgcgaggcgaatttgaaaccggcccggtaacacataactggagtacggctttcgaccgcgttatccgccagcggaaaaccataaacggcagcgggaacggcaacagcaagatagaagtgaaggcaaacgaaaatattgcgaatcaattggcatcgtttacagccgactatcccaattcttgggagaactctgccaacttggatgccaatatcaaagtcaacagcctggctttgtccgacaccttgggcttcgtggataacaaataccgcctgactttgggcgaacgtttccaaacagtcgaatataccgacaaaaaatcacagagcggcgatgccaaacgtttcagcccgatgctgatggcggcgtgggtgccgcaacctgatttggttgtgtacggcaactatatggaagacttggagcctgccgacattaaaaccgatgattccggtgaaacgacaatggcgaaaccgcgcgtcagccgccagtttgaagtgggcgttcgtaaaaactggggcgactttgttacgacgttgaacgcgtttcaaatcaaacgcccgggctactggcgcggcaataccaaaaaaggtactgattttgcagcatataaagcagcaggaggcgcagacggagatgaacaaggcatggaacgcagccgcggtatcgaattcaatgcctatgccaacctgttaaacaaaaccctgcgcccgactttcggcctgatgtacctgcaatcgaccgtgaaagactacccaaattcacgcgatatgctggttaacggcgtacaagtcgccaatccgcgcgtaattgccaaggcaggtttggaatgggatacaccgtttgccaaaggcttgactttaaacagcaatgtttcgtatttcggcaagtcttaccaagacacgcaaaaacaatacgccttcccatcctataccttggttgatgtaggcgcgcgctacaaaaccaagctcggcaaaaatacgttgaccgtcagcagctcggtggaaaatctgttcaacaaaaactactggcaggtacagcgcggccaatacgaccgcagcttcgccgtcgtcggtctgccgcgtacttactggctgaaggcggaattggatttctga

SEQ ID NO: 70391 - DNA, 1233 bp, Neisseria meningitidis; identical to SEQ ID NO: 60837

SEQ ID NO: 70392 - DNA, 399 bp, Neisseria meningitidis; identical to SEQ ID NO: 56204

SEQ ID NO: 70393 - DNA, 291 bp, Neisseria meningitidis
ttgccgagcgataaagaagcgcgggcagggtgcttatctttgcctgccaataacggtataattcgggcgttattaccgccttttaccggtataaacatcagactttttgccgccttgggtctcctgtccctttccggcgcggcggcgcaagcctccgtataccattgcaactcaaatggcaaaagcgtatatacatcagccccagcaggatcgtgcgccgatgcggatttacctaaaatcagcagccatcagggaggcggataccgcctgaaaattaaaaaactcagttaa

SEQ ID NO: 70394 - DNA, 216 bp, Neisseria meningitidis; identical to SEQ ID NO: 50197

SEQ ID NO: 70395 - DNA, 162 bp, Neisseria meningitidis; identical to SEQ ID NO: 38087

SEQ ID NO: 70396 - DNA, 159 bp, Neisseria meningitidis
ttggaacacattgcgcggggaatgtgcgtggctattatggcatattttggcggctttgttcgcgctttgttcgatcttggcgtgtttgaacgcggcgacgtgaaaggaagggggaaatggttttcccgcttttggcggcggtgtcggaggtgctgtgcc

SEQ ID NO: 70397 - DNA, 1128 bp, Neisseria meningitidis; identical to SEQ ID NO: 56209

SEQ ID NO: 70398 - DNA, 1002 bp, Neisseria meningitidis; identical to SEQ ID NO: 56210

SEQ ID NO: 70399 - DNA, 657 bp, Neisseria meningitidis; identical to SEQ ID NO: 56212

SEQ ID NO: 70400 - DNA, 612 bp, Neisseria meningitidis; identical to SEQ ID NO: 48102

SEQ ID NO: 70401 - DNA, 732 bp, Neisseria meningitidis
gtgtcgcgcgaaatcaatgcgggcgggcatcatttcctctacggcggcatcagcggcggcggcgtgcattattgggataacaaagatttcagcgaacagtgcctgcgcctgtcgctcggctataaaaatcgttcggtaacgcgctcgttcggcatcgtgccgtttatcgggcaaaacctcttaggcggcagccgatacaatttcgtcggcggcttcaatgccgatttctcccgacgcttgagcgaacgctggcggctgacgctgaacgtgggcaatatgtggaagcgttatcaggaagaccgcaccgccgcccgatacgacagccatatgccgctggcgggcgcgacgctgatgtattccgcgccgaaagactggctgctttacggcggtgcggactggtcgcacaacatgacgaaagaggcggaacaggcttccgtccgcaagggtttgcgtgtcggcgcagtcaaaacgttcgacggcgggcttggtctgcgggcaaacctgcgctatacccgcaggatgtttgacgcacccgggaccattgtgtaccgcttcccgcgcaaagaccacgaatatcaggcaaacctgtcgttgtggcacgacaaaatctcttggaagggctttacgccgcaactcaatttccgctatctgaaaatcgacagcaatatgaaaagtttttacacacgcaaaaacacgcagattttcatgagcgtggaaaaggatttcaaataa

SEQ ID NO: 70402 - DNA, 3201 bp, Neisseria meningitidis
atgcgaacgaccccaaccttccctacaaaaactttcaaaccggctgccatggcgttagctgttgcaacaacactttctgcctgcttaggcggcggcggcggcacttctgcgcccgacttcaatgcaggcggcaccggtatcggcagcaacagcagagcaacaacagcgaaatcagcagcagtatcttacgccggtatcaagaacgaaatgtgcaaagacagaagcatgctctgtgccggtcgggatgacgttgcggttacagacagggatgccaaaatcaatgcccccccgaatctgcataccggagactttacaaacccaaatgacgcatacaagaatttgatcaacctcaaacctgcaattgaagcaggctatacaggacgcggggtagaggtaggtatcgtcgacacaggcgaatccgtcggcagcatatcctttcccgaactgtatggcagaaaagaacacggctataacgaaaattacaaaaactatacggcgtatatgcggaaggaagcgcctgaagacggagacggtaaagacattgaagcttctttcgacgatgaggccgttatagagactgaagcaaagccgacggatatccgccacgtaaaagaaatcggacacatcgatgtggtctcccatattattggcgggcgttccgtggacggcagacctgcaggcggtattgcgcccgatgcgacgctacacataatgaatacgcatgatggaaccaagaacgaaataatgtctgcagccatccgcaatgcatgggtcaagctgggcgaacgtggcgtgcgcatcgtcaataacagttttggaacaacatcgagggcaggcactgccgaccatttccaaatagccaattcggaggagcagtaccgccaagcgttgctcgcctattccggcggtgataaaacagacgagggtatccgcctgatgcaacagagcgattacggcaacttgtcctaccacatccgtaataaaaacatgcttttcattttttcggcaagcaatgacgcacaagctcagcccaacacactgaccctattgccattttatgaaaaagatgctcaaaaaggcattatcacagtcgcaggcgtagaccgcagtggagaaaagttcaatggctccaaccattgcggaattactgccatgtggtgcctatcggcaccctatgaagcaagcgtccgtttcacccgtacaaacccgattcaaattgccggaacatccttttccgcacccatcgtaaccggcacggcggctctgctgctgcagaaatacccgtggatgagcaacgacaacctgcgtaccacgctgctgacaacggctcaggacatcggtgcagtcggcgtggacagcaagttcggctggggactgctggatgcgggtaaggccatgaacggacccgcgtcctttccgttcggcgactttaccgccgatacgaaaggtacatccgatattgcctactccttccgtaacgacatttcaggcacgggcggcctgatcaaaaaaggcggcagccaactgcaactgcacggcaacaacacctatacgggcaaaaccattatcgaaggcggttcgctggtgttgtacggcaacaacaaatcggatatgcgcgtcgaaaccaaaggtgcgctgatttataacggggcggcatccggcggtagcctgaacagcgacggcattgtctatctggcagataccgaccgatccggcgcaaacgaaaccgtgcacatcaaaggcgatctgcagctgggcggcgaaggtacgctgtacacacgtttgggcaaactgctgaaagtggacggtacggcgatgaccggcggcaagctgtacatgtcggcacgcggcaaaggggcaggctatctcaaccgtaccggacaacgtgttcccttcctgagtgccgccaaaatcgggcgggattattctttcttcacaaacatcgaaaccgacggtggtctgctggcttccctcgacagcgtcgaaaaaacagcgggcagtgaaggcgacacgctgtcctattatgtccgtcgcggcaatgcggcacggactgcttcggcagcggcacattccgcgcccgccggtctgaaacacgccgtagaacagggcggcagcaatctggaaaacctgatggtcgaactggatgcctccgaatcatccgcaacacccgagacggttgaaactgcggccgccgaccgcacagatatgccgggcatccgcccctacggcgcaactttccgcgcagcggcagccgtacagcatgcgaatgccgccgacggtgtacgcatcttcaacagtctcgccgctaccgtctatgccgacagtaccgccgcccatgccgatatgcagggacgccgcctgaaagccgtatcggacgggttggaccacaacggcacgggtctgcgcgtcatcgcgcaaacccaacaggacggtggaacgtgggaacagggcggtgttgaaggcaaaatgcgcggcagtacccaaaccgtcggcattgccgcgaaaaccggcgaaaatacgacagcagccgccacactgggcatgggacgcagcacatggagcgaaaacagtgcaaatgcaaaaaccgacagcattagtctgtttgcaggcatacggcacgatgcgggcgatatcggctatctcaaaggcctgttctcctacggacgctacaaaaacagcatcagccgcagcaccggtgcggacgaacatgcggaaggcagcgtcaacggcacgctgatgcagctgggcgcactgggcggtgtcaacgttccgtttgccgcaacgggagatttgacggtcgaaggcggtctgcgctacgacctgctcaaacaggatgcattcgccgaaaaaggcagtgctttgggctggagcggcaacagcctcactgaaggcacactggtcggactcgcgggtctgaagctgtcgcaacccttgagcgataaagccgtcctgtttgcaacggcgggcgtggaacgcgacctgaacggacgcgactacacggtaacgggcggctttaccggcgcgactgcagcaaccggcaagacgggggcacgcaatatgccgcacacccgcctggttgccggtctgggcgcggatgtcgaattcggcaacggctggaacggcttggcacgttacagctacgccggttccaaacagtacggcaaccacagcggacgagtcggcgtaggctaccggttctga

SEQ ID NO: 70403 - DNA, 1167 bp, Neisseria meningitidis
atggatatacaaagtaaagcgaaaaaattgattgagatgattcagacggcaccggtggagtggaagccgttgggggaagtggcaagtataggaaagggaaagcagcttaataaatcactacttagagaaaaagataagtatcccgtaatcaatggcggtattaatccatcaggttattggcatgaatacaataacgaagctggcacgattgttattagccaaggaggagcaagtgcggggtttgttaattggatggatatccctttttttgcaggagctcacgcatatactattaaagcgaacgaagacaaactattgcaacggtttgcatatatttttaaaaatgaagcaaattacattcatgcaatgtcaatacggagaggtataccagcacttgctaaaagtgaattgcaaaacttacttattcccatcccgcccctagaaacccaacaaaaaattgtaaaaatacttgacaaattcaccgagctggaagcggaattagccctgcgcaaacgccaataccggtattaccgcgactttcttttagattttgacaatcaaatcgggggggggatagctgatggctatcaatgccgtctgaaagatgtggtttggaagacgttgggggagattgccgaatattcaaaaaaccgtatttgttcggataaactgaacgaacataattacgtgggcgtggataatctcttacaaaatagagaaggtaaaaagttatccggttatgttccaagtgagggaaaaatgacagaatatattgccaatgacatcttgattggaaatattcgtccgtatttgaaaaaaatctggcaggcagactgcacgggcggaacaaacggtgatgttttggttatccgggtaacagatgaaaaggttaatccaaaatatctgtatcaggtattggccgatgataaattttttgcctttaatatgaagcacgccaaaggtgcaaaaatgccgcgtggcagcaaagcagcgattatgcaatataaaatccccatcccaccactccccgaacaggaaaaaatcgtcgccatcctagacaaattcgacaccctgacccactccgtcagcgaaggcctgccgtacgaaatcgccctgcgccgcaaacaatacgaatattaccgcgaacagctgcttgcctttcggtag

SEQ ID NO: 70404 - DNA, 1644 bp, Neisseria meningitidis
atgaaacaatccgcccgaataaaaaatatggatcagacattaaaaaatacattgggcatttgcgcgcttttagccttttgttttggcgcggccatcgcatcaggttatcacttggaatatgaatacggctaccgttattctgccgtgggtgctttggcttcggttgtatttttattattattggcacgcggtttcccgcgcgtttcttcagttgttttactgatttacgtcggcacaaccgccctatatttgccggtcggctggctgtatggtgcgccgtcttatcagatagtcggttcgatattggaaagcaatcctgccgaggcgcgtgaatttgtcggcaatcttcccgggtcgctttattttgtgcaggcattatttttcatttttggcttgacagtttggagatattgtgtatcgggggggtttgctgacgtaaaaaactataaacgccgcagcaaaatatggctgactatattattgactttgattttgtcctgcgcggtgatggataaaatcgccagcgataaagatttgcgagaacctgatgccggcctgttgttgaatattttcgacctgtattacgatttggcttccgcgccggcacaatatgccgccaagcgcgcccacattttggaagcagcaaaaaaagcgtcaacatggcatatccgtcatgttgcgcccaagtataaaaattatgttgtggttatcggtgagagcgcgcgttcggattatatgaatgtttacggtttcccattgcccgatacgccttttttgagtcagaccaaagggctgttgataaacggttaccaatcgaccgcccacgcgacgaatctttcgctgccgcagactttggggctgccgggagaaccgaacaataacatcgtcagcttggcgaagcaggcgggttttcggacggcgtggctgtctaatcaaggaatgttggggcattttgccaacgaaatttccacctatgccctacgcagcgattatccgtggtttacccaaaggggtgattatggcaaaagcgcggggttgagcgaccgccttttgttgccggcgttcaaacgggttttgataggaaatgcaggcacgaagcctcggctgattgtgatgcacctgatgggttcgcacagtgatttttgcacacgtttggataaggatgcgcggcggtttcagtatcaaactgaaaaaatatcctgctatgtttccaccatcgcgcaaaccgataaatttttagaagatacagttaagatattgaatgaaaataaagaaagctggtctttggtttacttttccgaccacggtttgatgcatgtcggtaaaggcggcgagcgaacgttgacacatggtgcgtggaagcgtcaaagctacggcgtgccgctggttaaaatttcgtccgatgacacgcggcgcgaaatgattaaagtgaggcgcagcgcgtttaattttttacgcggattcggcagttggacgggtatcgaaaccgacgagttgcccgatgacggctatgatttttgggggaatgttcccgatgtgccgggcgaaggcaataaccttgcctttatcgacggactgcccgacgaccccgcgccgtggtatgcgggaaaaggcaaatcgactaaaaatacgtctaaaaaatga

SEQ ID NO: 70405 - DNA, 1601 bp, Neisseria meningitidis
atgatttacggctcaatgccgtctgaaaagctcacaatttttcagacggcatttgttatgcaagtaaatattcagattccctatatactgcccagacgcgtgcgtgctgaagacaccccctacgcttgctacctgaaacagcttcagacggccaagaacgtcgattggaaacaggtgcagctggcctacgacaaatgggactataaacaggaaggcttgaccggagccggtgcagcgattatcgcgctggctgttaccgtggttactgcgggcgcgggagtcggagccgcactaggcttaaacggcgcagccgcagcagcggccgatgccgcctttgcctcactcgcttctcaggcttccgtatcgctcatcaacaataaaggcgatgtcggcaaaaccctgaaggaactgggcagaagccgcacggtaaaaaatctggttgtagcggcggcaacggcaggcgtatccaacaaactcggtgcctcttcccttgccacttggagcgaaaccccttgggtaaacaacctcaacgttaacctggccaatgcgggcagtgccgcgctgatcaacaccgctgttaacggcggcagcctgaaagacaatctggaggcaaatatcctggcggcattggtgaataccgcgcatggggaggctgcgagtaagattaagcaattggatcagcactatatcgcccacaaagttgcccatgccgtagcaggctgtgcagctgcggcggcgaataagggcaagtgtcaggacggcgcgataggagcggcggtcggtgaaatcctcggcgaagccctactggacggcagagaccctggcagcctgaatgtgaaggacagggcaaaaatcattgctaaggcgaagctggcagcagggacggttgcggcgttgagcaagggggatgtgaatgctgcggcgaatgcggctgctgtggcggtagagagtaatgcgcttagcaaggaaagaatggataaattgacaaaatgcctttccggtaaaacttgttctactacgatggaaaaagtaaatgccatcaaaaaggatgaacaatttagcaaagtaattgatacggaaattcaaaaagtctgttctaggaacccattgggcgatggttgcagaaacggcattaatatgtctattaaatatattgccatgcctgctgcgtggaagtatatgcctacggatgtatcacgggttgccaaagaagtttttggctatttatataactcacaaggggcatctacaagatttgacaagtatttcaacaccattgacaatcgtgcagatttctttgctgccagcaatctttatgagcaaaatttgggttcaaaagcacgatggtttggtggagctgattttgtatcgcgtgctgctataactgggttaggggcagacggagaagcttcttatataacttttgcggcaggtaaagttgttggtaatcctccaatttatgaatggagggctgcgtcaggcaatgcactgatagtaaatggattttataattttagagacttgttcaataaaaaaactaatcctagggagtgggatattcaacagttgaaaagcgagcaaaagttattacagcctattca

SEQ ID NO: 70406 - DNA, 2844 bp, Neisseria meningitidis
atgtgcaaccatcatccccgacattcgcacgacaacgacaccatccgcatacgcggcgcacgcacgcataatttgaaaaacatcgatttggacattccgcgccacaagctcgtggtcataacaggattgtcaggcagcggcaaatcatcgctggcatttgacacgctgtatgccgaagggcagcggcgttatgtcgagagcctttccgcctatgcccgtcaatttttacagatgatggacaaacccgatgtcgatttgatcgaaggcctctcgcccgcgatttccatcgagcaaaaatccaccagccacaatccgcgttccaccgtcggcacggtaactgaaatccacgattacctgcgccttttgtacgcccgcgtcggcacgccgtattgccccgaacacaatctgccgctatccagccagaccgtgtcgcagatggttgatgccgtgttgaagctgccggaagacacgcgcgtgatgattctggcgccggcggtacgcgagcgtaaaggtgagtttgtcgatttctttgccgacttgcaggcgcagggctttgcacgggtgcgagtggacggcgaggtctatcagcttgacgaagtgccgaagctggaaaaaaacatcaagcacaatatcgatgtcgtcatcgaccgcgtgaaagtaaaagctgacatcaagcaacggctggcagaaagttttgaaaccgctctgcgccacggcaacgaacgcgcactggcgatagagatggacagcggcgaagagcattggttttccgcgcgtttcgcctgccccgtatgttcgtacagcctgcccgaattggagccgcgcctcttttcgttcaacaacccgatgggctcctgcccgacttgcgacggcttgggtaacaccaatttcttcgactccgaaaaagtggtcgcgcatcccgaattgtcgctggcttcgggcgcgattgacggctgggacaagcgcaaccagttctatttccaaatgattcagtcgctggcgcggcattacggtttcgacgtgcaggctgcttgggaaaccctacctgcaaaaatcaaaaaagtcgtgttgcacggctcgggcaaagaagtcattgatttcacttacctgtccgaacgcggcaccaccttcaaccgcagccacgccttcgaaggcatcatccccaatctcgaacgccgctaccgcgaaaccgacagcgaaaccgtgcgcgaaaaactgcgcgaataccaaaaccaccgcgcttgcccgagctgcggcggcgcacgtttgcgcaaagaagcccgctacgtttacgtcggcggcgagccgttgcacgaagtttccgcctggccgctgaccaaaacccaccgattctttgaaacgctggatttggacggcaacaaaaaacaaatcgccgaaaaaatcctcaaagaaatcaccgaacgtctcggctttttgattaatgtcgggctggattacctgaatctctcccgttccgccgaaaccctttccggcggcgaagcccagcgcatccgcctcgccagccaaatcggcagcggcctgaccggcgtgatgtacgttttggacgcctccatcggcctgcaccagcgcgacaacgaccgcctgcttgccaccctcaaacgcctgcgcgatttgggcaacagcgtcatcgtggtcgaacacgacgaagacgccatccgcgaagccgatttcgtcgtcgatatgggcccgggcgcaggcgaacacggcggcaacgtattgattgccgacacgcccgaaaacgtcgccaaatgcgaaaactccgttaccggacaatacctcagcggcaaaaaatccattgccgtgccgtctgaacgcacgccagtcaatcccgaccgaatgctcgtcctcaaaggcgcgcgcggcaacaacctcaaaaacgttacccttgagctgccgctcggtttgattacctgcatcaccggcgtatccggcagcggcaaatccaccctgattaacgacaccctcgccaaaatcaccgcccgcgaactcaaccgcgcccaagaagaacccgccccatacgacgacatccgcggcctcgaacacctcgacaaagtcatcaacgtcgaccaatcccccatcggccgcaccccgcgctccaaccccgccacctacaccggcctgttcacccccatccgcgaactcttcgccggtgtacccctctcgcgcgaacgcggctacaacgtcggcagattctccttcaacgtcaaaggcggccgctgcgaagcctgccaaggcgacggcgtcatcaaagtcgaaatgcacttcctgcccgacgtgtacgtcccctgcgaagtctgccacggcaaacgctacaaccgcgaaacgctcgaaatccaatacaaaggcaaaaacatcagccaagtcctcgacatgaccgtcgaagaagcccgtgaatttttcgacgccgtccccaccgtatcgcgcaaactgcaaaccttgatggacgtaggcttaggctacatccgtctcggccaatccgccaccaccctctccggcggcgaagcccagcgcgtcaaactcgccttggaactctccaaacgcgacaccggcagaacgctctacatcctcgacgaacccaccaccggcctacacttcgccgacatcgccctgctgctggaagtcatagaccgtctgaaaggcaaaggcaactcgatagtgattatcgagcataatctggatgtgattaaaaccgccgattggattgtggacttagggccagaaggcggcgacggcggagggaggattattgcttcaggtagcccggaggaagtggcgaaggttaaggggagttatactgggaagtatttgaagaatatactttaa

SEQ ID NO: 70407 - DNA, 306 bp, Neisseria meningitidis
atggaatattgcgaacctgaagaagcatccgacccgtacgcaacatacaggcgtgccaacctgatggcgaggctgccgctgtttgtcgtgattttggttctgctcaatatttttccgcttccggcgcatcccttagcttggctggtgcctgcaggtttcatggttttggtcggcggctttcccttatcgctgccgcttgtggcgctgcttgtcctgacctgctgcattctggcgcattgtccgccattatcccgtcttttgtgctacccttgcccgaatcatccgatgtctaaaaattctgcctga

SEQ ID NO: 70408 - DNA, 2628 bp, Neisseria meningitidis
atgcaagaacaatatcaacccgccgccatcgagcctgcggcgcagaaaaaatgggacgacgcccgtattttcaacgtctccgaagacgcttccaaacccaaatattattgcctctccatgttcccctatcccagcggcaagctgcatatggggcatgtgcgcaactacaccatcggcgatgtattgagccgcttcaaacttttaaacggcttcaacgtcatgcagcctatgggttgggacgcgttcggcatgccggcggaaaacgcggcgatgaaaaacaacgtcgcccctgccgcttggacgtacgataacatcgaatacatgaaaacccagctcaaaagcctgggttttgcgattgactgggcgcgcgaaaccgcaacctgcaaacccgaatactaccgctgggaacaatggctgtttaccaagctgtttgaaaaaggcatcgtctatcgcaaaaacggcacggtaaactgggatccggtcgaccaaaccgtccttgccaacgagcaagtcatcgacggacgcggctggcgttccggcgcattgatcgaaaaacgcgaaatcccgatgtattacttcaaaatcacggattacgccgaagagctgctcaacgacttggacaagctggaacactggccggaacaagtcaaaaccatgcagcgcaactggatcggtaaatctcgcggcatgaccgtgcgcttcgccgtttcagacgacagcaaacaaggtttggaaggcgattacgcgaaattcctgcaagtttacaccacccgccccgacacgctgatgggcgcgacttatgtcgccgttgccgccgagcatccgctggcaaccgccgcagccgccgacaaacctgaattgcaagagtttatcgccgaatgcaaagccggctcggtcgccgaagccgatatggcgacgatggagaaaaaaggcgtgccgaccggccgctacgtcgtcaacccgctcaacggcgacaagctggaagtgtggattgccaactatgtattgtggggctacggcgacggcgcggtgatggcggttccggcgcacgacgaacgcgattttgagttcgccaccaaatacaatctgccgaaaaaacaagtcattgccggcgacaacgcatttgacgaaaaccaatggcaagaatggtacggcgacaaagaaaacggcgtattggtcaacagcggcgacttggacggcttggattttcagacggcattcgacgccgtcgccgccaagctgcaaagccaaggcgcgggcgaaccgaaaacccaataccgcctgcgcgactggggcatttcgcgccaacgctactggggctgcccgattcccatcgtccattgcgaacaatgcggcgacgtacccgtccctgccgaccaattgccggtcgttttgcctgaaaacgtcgtacccgacggcatgggttcgccgctggcaaaaatgcccgagttttacgaaactgcctgcccatgctgcggcggcgcggcgaaacgcgaaaccgacaccatggacaccttcatggaatcgagctggtatttcttccgctacatgtcgccaaaattttcagacggcatggtcgatcctgccgccgcgaaatactggggcgcggtcgaccaatacatcggcggcatcgaacacgcgattttgcacctcttgtacgcgcgtttcttcaccaaactgatgcgcgacgaaggtctagtcaatgttgacgaaccgtttgaacgcctgctgacgcaaggcatggtcgtttgcgaaacctactaccgcgaaaacgacaaaggcggcaaagattggatcaaccccgccgatgtcgagctgacgttcgacgacaaaggccgccccatttccgccgtcctcaaagccgacgggctgcccgtcgtcatcagcggcacggaaaaaatgtccaagtccaaaaacaacggcgtcgatccgcaagaactgattaacgcctacggcgcggacaccgcccgcctgtttatgatgttcgccgcaccgcccgaacagtccctcgaatggagcgacagcggcgtcgaaggcgcacaccgcttcctgcgccgcctgtggcgtaccgtttacgaatacttgaagcaaggcgaagcggtcaaagcgttcgcaggcagccaagacggtttgtctaaagaactcaaagacctgcgccacaaactgcacgcgaccactgccaaagtcagcgacgactacggccgccgccagcagttcaacaccgccatcgccgccgtgatggaattgctcaaccaatacgacaaaaccgacaccggcggcgaacaaggacgcgccgtcgcccaagaagtattggaaaccgccgtacgcctgttgtggcccatcgtgccgcacatctgcgaaaccctgtggagcgaattgaacggcgcgaaactgtgggaagcaggctggccgacagtcgacgaagccgccttggtcaaatccgaaatcgaagtgatggttcaagtcaacggcaaactgcgcggcaaaatcaccgtcgccgccgacgcctccaaagccgacctcgaagccgccgcccttgccactgaaggcgcggtgaaattcatggaaggcaagcccgcgaagaaaatcatcgtcgtaccgggcagactggtgaacatcgtcgtctaa

SEQ ID NO: 70409 - DNA, 801 bp, Neisseria meningitidis
atgccgacagttttcatctttttgacggcggtttacgcaggattgggtgcatttgcatggcactgccaacagcaggggcgcggtcgggattacccgtggaagacggaattgccggttttgggcgcggcattgaccgtccacggcgcggcactgctgatgccggtcattcaagacaaaatcatcattatgggcttcgggtattccggcagcctgattgtttggatgatgctgtttatttattttgccggcagcttcttttatccgctgcgcggagtgcagttgctgctgtatccatgcgccgcactgatgctgctgtcaggtttggtttttcctggaaaattctcgggatatgaaattaccgaccttccctttatgctgcatatcggaacttcgctgcttgcatacgggctgttcggcatcgcaacattattgtccgtcttgacgctgctgaatcgcagcctgcactgcaagaagctctccaagctagcaggattcctgccgtcgctgctcagggaaaaactcatgttccaggccatgtgggcaggtttcatccagctgacctattccgtcgtcagcggaacattttttgccgaagccgtattcggcaaacccatgacctttacccataaaaccgtattcggcatattgtcatggctgatttacggcggactgctgctcaagcacagcatgaccgcatggcgcggcaaaaaagccgccgtgtggaccatcatcggatttgtcagcctgatgattgcctatatgggcagcaagttcgtattggaaatcattctgaacagataa

SEQ ID NO: 70410 - DNA, 1164 bp, Neisseria meningitidis
atgagaaaattcaatttgaccgcattgtccgtgatgcttgccttaggtttgaccgcgtgccagccgccggaggcggagaaagctgcgccggccgcgtccggtgagacccaatccgccaacgagggcggttcggtcagtatcgccgtcaacgacaatgcctgcgaaccgatggaactgaccgtgccgagcggacaggttgtgttcaatattaaaaacaacagcggccgcaagctcgaatgggaaatcctgaaaggcgtgatggtggtggacgagcgcgaaaacatcgcccccggactttccgaaatgaccgtcaccctgttgccgggcgaatacgaaatgacttgcggtcttttgaccaatccgcgcggcaagctggtggtaaccgacagcggctttaaagacaccgccaacgaagcggatttggaaaaactgtcccaaccgctcgccgactataaagcctacgttcaaggcgaggttaaagagctggtggcgaaaaccaaaacttttaccgaagccgtcaaagcaggcgacattgaaaaggcgaaatccctgtttgccgacacccgcgtccattacgaacgcatcgaaccgattgccgagcttttcagcgaactcgaccccgtcatcgatgcgcgtgaagacgacttcaaagacggcgcgaaagatgccggatttaccggctttcaccgtatcgaatacgccctttgggtggaaaaagacgtgtccggcgtgaaggaaattgcagcgaaactgatgaccgatgtcgaagccctgcaaaaagaaatcgacgcattggcgtttcctccgggcaaggtggtcggcggcgcgtccgaactgattgaagaagtggcgggcagtaaaatcagcggcgaagaagaccggtacagccacaccgatttgagcgacttccaagccaatgtggacggatctaaaaaaatcgtcgatttgttccgtccgttgatcgagaccaaaaacaaagccttgttggaaaaaaccgataccaacttcaaacaggtcaacgaaattctggcgaaataccggactaaagacggttttgaaacctacgacaagctgggcgaagccgaccgcaaagcgttacaggcctctattaacgcgcttgccgaagaccttgcccaacttcgcggcatactcggcttgaaataa

SEQ ID NO: 70411 - DNA, 717 bp, Neisseria meningitidis
atggatacttttttagataggctcaaatttctttggcctcatggggctaagccatctgacatctataacaaaatagaaatgtcggcttctggatttaatagagtttggaaagagggagctatcccaacagccgattacctagtaaaaattcaagaagttaccggttgtgatttaaactggctgctgaccggaaaaggcttgccgtatctcgataaagccaggccggaaaacgccggagcattctctgtaagtagaaattctgatggaatcaccgacactatgggcaatctcgacctgtccgagtttgtattcgtgccgcgctacaacgtagccgcagcagcagggtatggcgcaccagtcttcggcgaagaacctttattctgcttggctttccggaaatattggattgacaactatgtgaccaaacagccggaaaaactgtctgtaattaccgttaaaggcgattcaatggagggcgtgctcaatcatggggattccattctcatcaaccacgccgaaactgacccgcgtgacggcctatatgtcttgcgtataggcaatgacctctttgtcaaacgtgtgcaacgtataccgggcaaactgcttgtaacgtctgaaaatccacgttacgcaccgtttgaaatagatttgagcaatgcccaagacgacatcgccatcataggccgtgttgagtggtatggccggagtattgattaa

SEQ ID NO: 70412 - DNA, 195 bp, Neisseria meningitidis; identical to SEQ ID NO: 40129

SEQ ID NO: 70413 - DNA, 262 bp, Neisseria meningitidis
agtgtttgctgttattttcttttcgacattgggctgtattttagcatggataagagatattcctaaaataaaatcaaaaaaaattttggcaagatccttatatattataggaataataaatgtaataatcagctatgtattaattaaaaatatattggtttctgtttcggatggaggtggaataaaatatgttgcaatatatttatcaaatcttttttttttggacagtattgatgtatgttcttgtgaaaagattatctaa

SEQ ID NO: 70414 - DNA, 2094 bp, Neisseria meningitidis
atgacactgaaagcaagcaagcaagcaagcaagcaagcaagcaagcaagcaagcaagcaagcaagcaagcaagcaagcaagcaagcaagcggtcgggttaatctattaacattatctgttttatcgctgttttgcacgccatatgtttgaggttcggatgcgtacgatcccgtcaaagaagccgagattaaaaacaaatttattttagaagcggcggaagacagaaattcccacgtttggcgcggcccgtgcagtgtgtcttttgattgcttcggtgctttcagttatcagcccggttcggatactcgttctacaaatattggcgatgctgccgatttttcattttcagacaagccggcaaacggcgtttcccattatttttccagcggtaaaaccgatccaaattcatctgaagccttgtatgacgaaatcaatatcacgggtaaaaactacaatagcggcatcctcgccgtcgataatatgcccgttgttaagaaatatgttacagagaattacggagctgatttaaagcaggcggttaaggatcaattaaaggatttatataaaacaagacccgaagattggggaaaaaataaaaaaatagttgaggaagcgataataaaacaatatggaatacctagaaataaaattaataaatttagaaaagttattgatccaattatagaagaagctgtactcactcctcatagtaatacaacaccgaccaatctcgacaacatcttcaataaaaaattacacgtcaaaatcgaaaacaaatcccacgtcgctggacaggtgttggaactgaccaagatgacgctgaaagattccctttgggaaccgcgccgccattccgacatccatacgctggaaacttccgataatgcccgcatccgcctgaacacgaaagatgaaaaactgaccgtccataaggattatgcgggcggcgcggatttcctgttcggctacgacgtgcgggagtcggacgaacccgccctgacctttgaagacaaagtcagcggacaatccggcgtggttttggaacgccggccggaaaatctgaaaacgctcgacgggcgcaaactgattgcggcaaaaacggcggattccggttcgtttgcgtttaaacaaaattaccggcagggactgtacgaattattgctcaagcaatgcgaaggcggattttgcttgggcgtgcagcgtttggctatccccgaggcggaagcggttttatatgcccaacaggcttatgcggcaaatactttgtttgggctgcgtgccgccgacaggggcgacgacgtgtatgccgccgatccgtcccgtcaaaatatacggggtggcgcggctgcggacgggcggcgcaaaggcgtgcaaatcggcggcgaggtgtttgtacggcaaaatgaaggcagccggctggcaatcggcgtgatgggcggcagggtcggccagcacgcatcagttaacagcaaaggcggtgcggcaggcagtgatttgcatggttatggcgggggtgtttatgctgcgtggcatcagttgcgcgataaacaaacgggtgcgtatttggacggctggttgcaataccaacgtttcaaacaccgcatcaatgatgaaaaccgtgcggaacgctacaaaaccaaaggttggacggcttctgtcgaaggcggctacaacacgcttgtggcggaaggcgttgtcggaaaaggcaataatgtgcggttttacctgcaaccgcaggcgcagtttacctacttgggcgtaaacggcggctttaccgacagcgaggggacgggggtcggactgctcggcagcggtcagtggcaaagccgcgccggcattcgggcaaaaaaccgttttgctttgcgtaatggtgtcaatcttcagccttttgccgcttttaatgttttgcacaggtcaaaatctttcggcgtggaaatggacggcgaaaaacagacgctggcaggcaggacggcgctcgaagggcggttcggcattgaagccggttggaaaggtcatatgtccgcacgcatcggatacggcaaaaggacggacggcgacaaagaagccgcattgtcgctcaaatggctgttttga

SEQ ID NO: 70415 - DNA, 2043 bp, Neisseria meningitidis; identical to SEQ ID NO: 48103

SEQ ID NO: 70416 - DNA, 606 bp, Neisseria meningitidis; identical to SEQ ID NO: 54648

SEQ ID NO: 70417 - DNA, 678 bp, Neisseria meningitidis; identical to SEQ ID NO: 61606

SEQ ID NO: 70418 - DNA, 1095 bp, Neisseria meningitidis
atgagttccgccatcggtccttacaaaggcggcttgcgcttccatccgaccgtcgatttgggcgtattgaaattcctcgcttttgaacaagtgttcaaaaacgccttgaccaccctgcctatgggcggcggcaaaggcggttccgacttcgaccccaaaggcaaatccgatgccgaagtaatgcgcttctgccaagcctttatgaccgaactctaccgccacatcggcgcggacaccgatgttccggccggcgacatcggtgtaggcgggcgcgaaatcggctacctgttcggacaatacaaaaaaatccgcaacgagttttcttccgtcctgaccggcaaaggtttggaatggggcggcagcctcatccgtcccgaagcgaccggctacggctgcgtctatttcgcccaagcgatgctgcaaacccgcaacgatagttttgaaggcaaacgcgtcctgatttccggttccggcaacgtggcgcaatacgccgccgaaaaagccatccaactgggcgcgaaagtgctgaccgtttccgactccaacggcttcgtcctcttccccgacagcggtatgaccgaagcgcaactcgccgccttgatcgaattgaaagaagtccgccgcgaacgcgttgccacctacgccaaagagcaaggtctgcaatactttgaaaaccaaaaaccgtggggcgtcgccgccgaaatcgccctgccctgcgcgacccagaacgaattggacgaagaagccgccaaaaccctgttggcaaacggctgctacgtcgttgccgaaggtgcgaatatgccgtcgactttgggcgcggtcgagcaatttatcaaagccggcatcctctacgccccgggaaaagcctccaatgccggcggcgtagcaacttcaggtttggaaatgagccaaaacgccatccgcctgtcttggactcgtgaagaagtcgaccaacgcctgttcggcatcatgcaaagcatccacgaatcctgtctgaaatacggcaaagtcggcgacacagtaaactacgtcaatggtgcgaacattgccggtttcgtcaaagttgccgatgccatgctggcgcaaggcttctaa

SEQ ID NO: 70419 - DNA, 492 bp, Neisseria meningitidis; identical to SEQ ID NO: 38741

SEQ ID NO: 70420 - DNA, 810 bp, Neisseria meningitidis; identical to SEQ ID NO: 54624

SEQ ID NO: 70421 - DNA, 1422 bp, Neisseria meningitidis; identical to SEQ ID NO: 56091

SEQ ID NO: 70422 - DNA, 960 bp, Neisseria meningitidis; identical to SEQ ID NO: 61372

SEQ ID NO: 70423 - DNA, 297 bp, Neisseria meningitidis
atggacgctaaacatcggctgaaaaaatacgtttaccacctgttggtagccatcgaccaactgttcaacgccctaaccggcggcgcggcggacgaaaccctctcaagccgcacctatcgcggcgcgcggctcgcccaaaagcccaaaacccgctggaaggttttatacaccctgatcaacggcgtatttttcgaccgccaccactgccgacaggcgtatatcagcgaactgaaaggcaggcagcacgacgcgcggttcaaccaaagccgcgccgctggggaaaaggggacgcgatga

SEQ ID NO: 70424 - DNA, 903 bp, Neisseria meningitidis
atggataccgcaaaaaaagacattttaggatcgggctggatgctggtggcggcggcctgctttaccattatgaacgtattgattaaagaggcatcggcaaaatttgccctcggcagcggcgaattggtcttttggcgcatgctgttttcaaccgttgcgctcggggctgccgccgtattgcgtcgggacaccttccgcacgccccattggaaaaaccacttaaaccgcagtatggttgggacgggggcgatgctgctgctgttttacgcggtaacgcatctgcctttggccaccggcgttaccctgagttacacctcgtcgatttttttggcggtattttccttcctgattttgaaagaacggatttccgtttacacgcaggcggtgctgctccttggttttgccggcgtggtattgctgcttaatccctcgttccgcagcggtcaggaaacggcggcactcgccgggctggcgggcggcgcgatgtccggctgggcgtatttgaaagtgcgcgaactgtctttggcgggcgaacccggctggcgcgtcgtgttttacctttccgtgacaggtgtggcgatgtcgtcggtttgggcgacgctgaccggctggcacaccctgtcctttccatcggcagtttatctgtcgtgcatcggcgtgtccgcgctgattgcccaactgtcgatgacgcgcgcctacaaagtcggcgacaaattcacggttgcctcgctttcctatatgaccgtcgttttttccgccctgtctgccgcattttttctgggcgaagagcttttctggcaggaaatactcggtatgtgcatcatcatcctcagcggtattttgagcagcatccgccccactgccttcaaacagcggctgcaatccctgttccgccaaagataa

SEQ ID NO: 70425 - DNA, 1392 bp, Neisseria meningitidis; identical to SEQ ID NO: 56132

SEQ ID NO: 70426 - DNA, 2838 bp, Neisseria meningitidis
atgaacagaaggcatacattcccgcttaccctgaccgccttggccattgccgccgccttcccgtcatatgcggcaaaccctgaaacggcggcacctgatgcggcgcagacccaatccttgaaagaggttaccgtccgtgccgccaaagtgggacggcgatcgaaagaggcgaccggtttgggcaaaatcgtcaaaacgtcggaaacgttgaacaaagaacaggtactcggtatccgcgacctgacgcgctacgatccgggcgtggcggttgtcgaacagggcaacggcgcgagcggcggctactcgatacgcggcgtggataaaaaccgtgtggcggtttcggttgacggcgttgcccaaatacaggcgtttaccgtgcagggatcgttgagcggatacggcggacgcggcggcagcggtgcaatcaacgaaatcgaatatgaaaacatcagcacggtggaaatcgacaaaggtgccggttcgtccgatcacggcagcggcgcactcggcggcgcggtcgccttccgtaccaaagaggcggcagacctgatttcagacggcaaaagctgggggatacaggcaaaaactgcctacggcagtaaaaaccgccaatttatgaagtcgctcggcgcggggttcagcaaagatggttgggaagggctgttaatccgaaccgaacgccaagggcgggaaacgcgcccgcacggcgatattgcggatggggtggcatacggcatagaccgtttggacgcgttccgccagacatacgatattcagcatccgaataaaaaggcggaatatttcctggcggagggcgagagtgaacccaagcccgtggcaaaattagcgggcaacggaaactatttgaaaaaccagctcaaccgctgggtggaagaacgccgttcaaaaggtcaggctttaaacagtgaagaagaagcgatggtgcgggaggcgcaggcgcgccacgaaaacctgtccgcccaatcgtacacgggcggcggcaggatattgcccgatccgatggattaccgcagcggttcgtggcttgccaagctgggctaccgcttcggcggcaggcattatgtcggcggcgtgtttgaggataccaaacagcgttacgacatccgcgatatgacggaaaaacagtattacggtacggacgaggcgaacaagtttagaaacaagagcggggtgtacgacggcgacgatttccgcgacggcttgtattttgtgccgaatatagaagagtggaagggcgatacaaatttggtcaagggcataggtttgaaatattcccgcaccaaatttattgacgaacatcaccgccgccgccgtatgggtttgctgtaccgttatgaaaacgaagcgtattctgacaactgggcggataaggcggtgttgtcgtttgacaaacagggggtggcaaccgacaacaacacgctgaagctgaattgcgccgtgtatcctgccgtggacaaatcctgccgcgcgtcggcggacaaaccgtattcctacgacagcagcgaccgtttccactaccgcgaacagcacaatgttttgaatgcctcgtttgagaagtcgctgaaaaacaaatggacgaaacaccatctgactttgggcttcggttacgatgcttccaacgcgatttcccgccccgaacagctttcccacaatgcggcaaggatttcggaacacacgggggagtacaccgccgacggcaaagacaagtaccgtttgggtaagcccgaagtcgtcgaaggatcggtctgcggctacatcgaaaccctgcgttcccgcaaatgcgtgccaagaaaaatcaacggcagcaatatccatatttctttgaacgaccgtttttcaatcggcaaatatttcgatttcagcttgggcggcaggtacgaccggaaaaacttcaccacgtcggaagaactcgtccgcagcggacggtatgttgaccgttcgtggaacagcggcatcgtgttcaaaccgaaccggcatttttctttgtcttaccgcgcctccagcggcttcagaacgccctcattccaagagcttttcgggatagacatttatcacgattatccgaaaggctggcagcgtcccgccctgaaatcggaaaaggcagccaaccgcgaaatcggtttgcagtggaagggcgatttcggctttttggaaatcagcagcttccgcaaccgttataccgatatgattgccgttgccgatcacaaaaccaaattgccgaatcaggcaggacaattgacagagattgatatacgcgattattacaatgcccaaaatatgtcgctccaaggcgttaatatattgggaaaaatcgactggaacggtgtgtacggcaaactgcccgaaggtttgtacacgactttggcgtacaaccgtatcaaaccgaaatcggtatccaaccggccgggactgtctctccgcagctatgctttggatgcggtacagccgtcgcgttatgttttggggttcggatacgaccagcccgaggggaaatggggcgcaaacattatgctgacctattccaaagggaaaaaccctgacgagcttgcttatctggcaggcgatcaaaaacgatattcgacaaaaagagcgtcgtcttcttggtcgacggcagacgtttccgcctatctgaatctgaaaaaacggctgaccttgagggcggctatctacaatatcggcaactaccgctacgttacttgggaatccttgcgccagaccgcggaaagcacggcaaaccggcacggcggcgacagcaactatggaaggtatgccgcaccgggcaggaacttcagcctcgcgctcgaaatgaagttttaa

SEQ ID NO: 70427 - DNA, 1047 bp, Neisseria meningitidis; identical to SEQ ID NO: 61211

SEQ ID NO: 70428 - DNA, 489 bp, Neisseria meningitidis
  misc_feature 466, 467, 468, 469, 470: 'n' is a, c, g or t
ttggctgattttaaacctgactttgcgtggctgttgaaacgaccgttgtgttttttggcttttggtttcggcagcgggctggctccgttcgcgccgggtacatttggcactttggcggcactgcctttggcatttgtgctgattttgctcggcatagacgggctgctgctggcttttttgtgtatcgtgctgtttatgtggggcatacgcatttgcgcttatgcggaacgtgaaacgggtgtcagcgaccatggtgggattgtttgggacgagattgtcgccatgctgtttgtgctggcgtttgtgccgttcaggtggacgtggtggctggcggcatttgtcctattccgtctgtttgacgcgctcaaaccgtctcccgtcggttggtttgacaagaatctgcacggcggtttgggcattatggcggacgatatggcggctgcggtgatgactttgattgtcttgnnnnncacacacttaattaattaa

SEQ ID NO: 70429 - DNA, 750 bp, Neisseria meningitidis; identical to SEQ ID NO: 37238

SEQ ID NO: 70430 - DNA, 684 bp, Neisseria meningitidis
  misc_feature 669, 670, 671, 672, 673: 'n' is a, c, g or t
atggcaaaaattggggattttgccgccaaatccatgatagagatacggagcaaacgaatgattaccctgccttccttaaacaatctgccgtcaaaatgggatgaaatccgctattggctcgaaacccgggtttgtgagtgcggcgttatgccgcatcccaatttgacggaatgcgaagccgggcagttcgatcgggatttttgggacaatatcggctgcgcgcctgaagaatatgtccgtatccgccgagccatccgtctgttggaagcgcgttatcccgacagtttgaatgagctggtgtgtgccgccattgccacgcctttgggcgagatgctggcggtgttcggaaataagggattgtgtctgctggagtttgtcggacagaagcatttggaacaggaaattgccgccgtccaaaaagccttgcgcggacggtttgtgtttcgggaggatgagcggacgcaacttttgcggcaggaattggacttatacttcaagggtcgtctgaaaacctttgccacgcctttggagcagattggcaccgagtttcaaaagcaggcatgggacgcgctcttggcgattccttacggcgaaacgcgcagctacaaagagcaggcgcagcgtttgggcaaccccaacgccgtccgcgccgttgccgccgccaacggnnnnncacacacttaa

SEQ ID NO: 70431 - DNA, 366 bp, Neisseria meningitidis; identical to SEQ ID NO: 46768

SEQ ID NO: 70432 - DNA, 621 bp, Neisseria meningitidis; identical to SEQ ID NO: 54243

SEQ ID NO: 70433 - DNA, 690 bp, Neisseria meningitidis; identical to SEQ ID NO: 54544

SEQ ID NO: 70434 - DNA, 132 bp, Neisseria meningitidis
gtggcatcctccccctccgacatcaaaggcaaatatgttcagaaagttgaagtcgcaaaaggcgtcattaccgccacaatgctttcaagcaacgtaaacaacgaaatcaaagacaaaaaactctccctgtag

SEQ ID NO: 70435 - DNA, 1386 bp, Neisseria meningitidis; identical to SEQ ID NO: 55511

SEQ ID NO: 70436 - DNA, 939 bp, Neisseria meningitidis
atgcttgaactgaacggactctgcaaacgcttcggcggcaaaacggttgccgacaacatctgcctgactgtcgggcgcggcaaaatactcgccgttttggggcggtcgggctgcggaaaatcaacactgctgaatatgattgcggggattatccgtccggacggcggcgaaattcggctgaacggggaaaacattacccgtatgccgcccgaaaaacgccgtatttcgctgatgtttcaagattacgcgctgtttccccatatgagtgcgctggaaaatgcggcattcggtttgaaaatgcaaaaaatgccgaaagccgaagccgaacgccttgccatggcggcacttgccgaagtcggactggaaaacgaggtgcaccgcaagcctgaaaaactttccgggggcgagaagcaacggttggcactggcgcgcgctttggttgtccgcccttccctgctgctgttggacgaatcgttttccagtttggacacgcatttgcgcgaccggctgcgccgcatgactgccgaacgtatccgaaacggcggcatccctgccgttttggtaacgcattcgcccgaagaagcctgtacgacggcagacgaaatcgccgtgatgcatgaagggaggattctacaatacggcacacccgaaaccttggttcaaacgcctgccggcgtgcaggtcgcccgtctgatggggctgcccaacaccgacgatgaccgccatatcccgcaaaatgcggtgcgtttcgaccaagacggcatggagtgccgcgtattatcccgtacctgtttgcccgaatcgttcagcctgtccgtcctccatccggaacacggcatcctgtggctgaacctcgatatgcggcacgccggggcggtatcgggcaaggatacggtacgcatccatatcgaagaacgggaaatcgtccgcttccgctga

SEQ ID NO: 70437 - DNA, 942 bp, Neisseria meningitidis; identical to SEQ ID NO: 55817

SEQ ID NO: 70438 - DNA, 957 bp, Neisseria meningitidis; identical to SEQ ID NO: 55620

SEQ ID NO: 70439 - DNA, 372 bp, Neisseria meningitidis; identical to SEQ ID NO: 40198

SEQ ID NO: 70440 - DNA, 873 bp, Neisseria meningitidis
gtgaaaggactcgactattgccgccaaaaagcagaagaaagccgctccagttttttgtcgggcttccgtttcctgactcaggaaaaacgggatgcggtaacggttttatatgctttttgccgcgaattggacgatgtggttgacgaatgttccaaccccgatgttgcacaggcgacattgaactggtggcgcggcgatttggacaaggtattcggcggcgcgatgccggaacaccccgtcaatcaggccttgcggcaagttaaggaaaccttcaagctgccgaaatatgaactggaagccttaatcgacgggatgcagatggatttgcttcgggtgcgttacggcagttttgaagaattaaaactgtattgccgccgcgtcgcgggcgtggtcggctgcctgattgcgcggattttggggttttcagacgaccaaacgctggaatacgccgacaagatgggacttgcgctgcaactgaccaacatcatccgcgatgtcggcgaagacgcgcgcaggggacggatttacctgccgatggaggaaatgcggcggtttgatgtccccgcaagcgtgattttgcaatgcagcccgacgggcaattttgccgaattgatggcgttccaaatcaaacgcgcccgcgaaacctaccgcgaagccgtatcgctgctgcctgatgccgataaaaaagcccaaaaagtcggactggtcatggcggcggtttattacgcgcttttaaacgaaatcgaccgagacggcgcgcaaaacgtcctcaaatacaaaatcgccctcccttcgccgcgcaaaaaacgcattgccctgaaaacctggttattcggattcaaaccgcgccccggcacgccggaacgggcataa

SEQ ID NO: 70441 - DNA, 450 bp, Neisseria meningitidis
atgatggcgatggtcggcttcattatgattgccgcgcagggttttgccgccgtgatgaatgcgaccgggcatattcagccgctggtggaaagcagtatggcgatattcggcaacagcaaaggtatggcggcgttggcgatgctggtggtggggcttttggtaacgatgggcatcggttcgtccttttccactttgccgattattgccgcgatttatgtgcctttgtgtgtcggtttgggtttttcgccgcttgccaccgtcgccattgtcggcacggcgggggcgttgggcgatgccggttcgcctgcgtccgattccacgctgggcccgacgatggggctgaacgccgacgggcagcacgaccacatccgcgattccgttatcccgaccttcatccactacaacatcccgctgctgattgccggctggattgccgcgatggtgctgtaa

SEQ ID NO: 70442 - DNA, 1257 bp, Neisseria meningitidis
atgaaagtgcttgttttaggtgcgggtgttgccggcgtgtcttccgcgtggtatctggcagaggcaggacatgaagtaacggtcatcgaccgcgccgagggtgtggcgatggaaaccagttttgccaacgcaggccagctttcttacggctataccacgccttgggctgcacccggtatcccgaccaaagcgctgaaatggctgtttaaaagccatccgcctttgctgtttcgccccgacggcagcctgtatcaaatcgaatggctgtggcaaatgctgcaaaactgcacggcagcgcactatcaaaccaataaagagcgcatggtcaggatttccgaatatagccgtgaaatgttccgccgttttgaagcgcaaaccggcatgaattttgaggaacgcaaaaaagggacgttgcagattttccgccaaaccaaagaagtcgaagcggcagaacaagacattgccgttttggaacgctacggcgtgccgtaccgccgtctgaaacccgaagaatgtgcagaatttgagcctgcgctggcacgcgttaccgccaaaattgccggcggcctgcacctgcctgcagatgcgaccggcgactgccacctcttcactgaaaacctatacaaattgtgtcaggaaaagggcgtacagtttcatttcaaccaaaccatcagccgcatcgaccataacgggctgcgcatcaaagccgttgaaaccgaaacagggcggtttgaagcagatgccgttgtctgtgcgctcggctgcttcagtaggactgtgttggcgcagttggatctcaatctgcccatttatcccgtcaaaggctattccttgaccctgccggtcaccaattcagacggcgcaccggtgtccaccgttttagatgaaagctacaaagtcgccatcacgcgctttgacaacagaatccgcgtcggcggtatggcggaattgtcgggctacgaaatcaaactgcccgaaaaacgccgcgaaaccttggctttggtcgtcaacgacttgttcccggaaggcggcgatttgagccaagcatcgttctggagcggcctcagaccgatgacgcccgacagcacgccgttaatcggtcgcacccgctttgacaacctgtttctgaataccggccacggtactttaggctggaccatgtcgctgggttcggcaaaattaaccgccgatatcgtgagcggcaaagacaccgaaatccgcagcgacgatttgagcctgtcgcgttatcaggcttaa

SEQ ID NO: 70443 - DNA, 729 bp, Neisseria meningitidis; identical to SEQ ID NO: 55508

SEQ ID NO: 70444 - DNA, 1356 bp, Neisseria meningitidis; identical to SEQ ID NO: 54732

SEQ ID NO: 70445 - DNA, 744 bp, Neisseria meningitidis
atgtccgaacaccgagtcaaccacgaacccgtctttctgttggcttcctcgccatggcgcgaaagcagcctgcgggtcgaagccttcagccgccgttacgggcgtgtggcacttttggcaagaagcgcgcgcaagcggcagagcgaattgcgcggcgtgctggtttctttcgtgcccgtcagcgcgtcgtggtacggcagtcaggaactcaaaacccttcaccgtgccgaatgggtcggcggatggcggcagccgcagggcagggcgttgttcagcggtctgtatgtgaacgaactggtgttgaaactgaccgcgcgcgaagatccgatgcccgaactgtacgacgcgttggcaaaagtgatggaggcggtgtgtcgtgaagccaaccacattgccgatttgcgccgcttcgagtggaagctgctcaatgccttgggcgttgcccccgatttgcacgccgacggcacgggcggcgatattttggcggacaaaacctaccggctgatgcccgaagaggcggtcatgcccgtatgcgaggacgcagacgcgctttcgcacgaggccggcgcaattgtcgaagggcaaagcctgatcgatttgcgcgaaggcagtttccgcaccgccgaaagcctgcaacaggcattgaaaatcacacggctgctgatcggcacgctgcttcccgaaggcttgaaatcgcggcaggtgttggaacagataaggcagtttgaccgcaataccgcgtag

SEQ ID NO: 70446 - DNA, 618 bp, Neisseria meningitidis
atgccctatacggaagatatgcgcccgggcgataccgctaatccttatggcgcgtccaaagcgatggtggaacggatgttaaccgacatccaaaaagccgatccgcgttggagcgtgattttgttgcgttatttcaacccgatcggcgcgcatgaaagcggcttgatcggcgaacagcccaacggcattcccaacaaccttttgccctatatctgccaagtggcttcgggcaggctgccgcaactgtcggtattcggcggcgattatccgacccccgacggcaccggtatgcgcgactatattcatgtgatggatttggcagaagggcatatcgcggcaatgaaggcaaaaggcggtgttgccggcgtacatttgttcaacttgggttcggggcgcgcctattccgttttggaaatcatccgtgcctttgaagccgcatccggcttaaatattccctatcaaatccaaccccgtcgcgccggcgacttggcgtgttcctttgccgacccgtcccataccaaacaacaaaccggctgggaaaccaaacgcggtttgaaacaaatgatggaggattcgtggcgttgggtcagccgcaaccccaacggatatggggattaa

SEQ ID NO: 70447 - DNA, 159 bp, Neisseria meningitidis
atgaaaacccccctccccatctgcaccctgtcggcactcgccgcctgcgccctttccggacaaggcggcagcagggtttacggcgaaatcaaagcccgagacctttgcgttaccgctcctatcctgctttctgctttctgtcttgcctgctctcgttga

SEQ ID NO: 70448 - DNA, 342 bp, Neisseria meningitidis; identical to SEQ ID NO: 43005

SEQ ID NO: 70449 - DNA, 885 bp, Neisseria meningitidis; identical to SEQ ID NO: 55986

SEQ ID NO: 70450 - DNA, 483 bp, Neisseria meningitidis
atgggaatagaaggcgttttgaaaaaaggtttcatcaccaccagcgcggatacggtgctgaactatatgcgtaccggttcattgtggccggttactttcggcttggcctgctgcgccgtggaaatgatgcatgcaggtatggcgcgttatgaccttgaccgtttcggcatcattttccgtccgtccccacgtcaggccgacctgatgattgtggcaggtacgctgaccaacaaaatggcgcccgccctgcgccgcgtatacgaccagctcgccgagccgcgttgggtattgtctatgggctcatgtgccaacggcggcggctattatcactattcttattccgttgtgcgcggtgccgaccgcgtcgtgccggtagatgtttatgtgccgggttgtccgccgactgcggaagccctgatttacggcctgattcagctccaacaaaaaatcaagcgcacttccaccattgcgcgtgacgagtaa

SEQ ID NO: 70451 - DNA, 456 bp, Neisseria meningitidis
  misc_feature 6, 7, 8, 9, 10: 'n' is a, c, g or t
gtgtgnnnnntgccgctgaccgatgccgcgttcgaggcggaatacctcgccgtcgatcaagtcgaaaaactgggcaacgaagaacaagccctgcttttttccatcttcaaccgcttccgcaacagcggcaaaggctttttgctgctcggttcggaatacacgccccagcagcttgtcatccgcgaagatttgcggacgcgtatggcgtactgcctcgtttacgaagtcaaacccttaaccgaccaagaaaaaatcgacgcgctcgccagtatggcggcggcacgccaagtaaccgtcgattccgaaattttcgaatacctgctcaaacactggcggcgcgatatggacagtctgatgatgatgctcgacacgctggacaactacgccgtcacaatgggcaaacgcatcaccctgccgcttttgcgccagcttttgaaacaacaggaaacccaatga

SEQ ID NO: 70452 - DNA, 1953 bp, Neisseria meningitidis; identical to SEQ ID NO: 60495

SEQ ID NO: 70453 - DNA, 372 bp, Neisseria meningitidis; identical to SEQ ID NO: 37474

SEQ ID NO: 70454 - DNA, 786 bp, Neisseria meningitidis
  misc_feature 4, 5, 6, 7, 8: 'n' is a, c, g or t
gtgnnnnngaaaaccatcacagaaaccctaaatctcgccccgaaaggcaaaaacttcctgaccgccgattggcccgcgcccgccaatgtgaaaaccctgattaccacgcgcaacggcggcgtgagccaaggtgcgtatcagagtttgaacctcggtacgcacgtcgacgacaatcccgaagccgtgcgccgcaaccgcgaaatcgtgcaacagcaggtcggattgcccgttgcctacctcaatcaaatccacagtaccgtcgtcgtcaatgctgccgaagcgttgggaggcacacccgatgcggacgcttccgtagacgacacgggcaaagttgcctgtgccgtgatgaccgcagactgcctgcctgttttgttttgcgacagggcgggtacgacggttgccgccgcacacgcgggctggcgcggtttggcgggcggcgtattgcaaaacaccattgccgcgatgaaggttccgcctgtcgaaatgatggcgtatctcggccccgccatcagtgcggatgcgtttgaagtcggacaggacgtgtttgatgcgttctgcacgcccatgcccgaagccgccgccgcatttgaaggcataggtggcggcaaattccttgccgacctttacgcgctcgcccgcctgattctgaagcgcgaaggcgtgggcggcgtatatggcggcacgcattgtacggttttggaacgggatactttcttttcctaccgccgcgacggagcgacagggcgtatggcgagcctgatttggctggacggcaatgccgtctga

SEQ ID NO: 70455 - DNA, 1251 bp, Neisseria meningitidis; identical to SEQ ID NO: 56158

SEQ ID NO: 70456 - DNA, 492 bp, Neisseria meningitidis; identical to SEQ ID NO: 61194

SEQ ID NO: 70457 - DNA, 603 bp, Neisseria meningitidis; identical to SEQ ID NO: 54300

SEQ ID NO: 70458 - DNA, 729 bp, Neisseria meningitidis; identical to SEQ ID NO: 39174

SEQ ID NO: 70459 - DNA, 2640 bp, Neisseria meningitidis
ttgaaaaacaacagacaaatcaaactgattgccgcctccgtcgcagttgccgcatcctttcaggcacatgctggactgggcggactgaatatccagtccaaccttgacgaacccttttccggcagcattaccgtaaccggcgaagaagccaaagccctgctaggcggcggcagcgttaccgtttccgaaaaaggtctgaccgccaaagtccacaagttgggcgacaaagccgtcattgccgtttcttccgcacaggcagtccgcgatcccgtcctggtgttccgcatcggcgcaggcgcacaggtacgcgaatacaccgccatcctcgatcctgtcggctactcgcccaaaaccaaatctgcactttcagacggcaagacacaccgcaaaaccgctccgacagcagagtcccaagaaaatcaaaacgccaaagccctccgcaaaaccgataaaaaagacagcgcgaacgcagccgtcaaaccggcgtacaacggcaaaacccataccgtccgcaaaggcgaaacggtcaaacagattgccgccgccatccgtccgaaacacctgacgctcgaacaggttgccgatgcgctgctgaaggcaaacccaaatgtttccgcacacggcagactgcgtgcgggcagcgtgcttcacattccgaatctgaacaggatcaaagcggaacaacccaaaccgcaaacggcgaaacccaaagccgaaaccgtatccatgccatctgaaccgtccaaacaggcaacggtagagaaaccgatagagaaacctgtcgaaaaacctgtcgaaaaacctgtcgaaaaaccggttgaaaaaccggttgaaaaacctgaagcaaaagttgccgcgcccgaagcaaaagtggaaaaaccggccgttcgacccgaacccaaacccgcagcgtccgaaactccggcttcggcgacagaacgccaacccgaacctgtacccgctgcaaatactgccgcatcggaaaccgctgccgaatccgccccccaagaagccgccgcttctgccatcgacacgccgaccgacgaaaccggtaacgccgtttccgaacctgtcgaacaggtttctgccgaagaagaaaccgaaagcggactgtttgacggtctgttcggcggttcgtacaccttgctgcttgccggcggaggcgcggcattgatcgccctgctgctgcttttgcgccttgcccaatccaaacgcgcgcgccgtaccgaagaatccgtccctgaggaagagcctgaccttgacgacgcggcagacgacggcatagaaatcacctttgccgaagtcgaaactccggcaacgcccgaacccgctccgaaaaacgatgtaaacgacacacttgccttagatggggaatctgaagaagagttatcggcaaaacaaacgttcgatgtcgaaaccgatacgccttccaaccgcatcgacttggatttcgacagcctggcagccgcgcaaaacggcattttatccggcgcacttacgcaggatgaagaaacccaaaaacgcgcggatgccgattggaacgccatcgaatccacagacagcgtgtacgagcccgagaccttcaacccgtacaaccctgtcgaaatcgtcatcgacacgcccgaaccggaatctgtcgcccaaactgccgaaaacaaaccggaaaccgtcgataccgatttctccgacaacctgccctcaaacaaccatatcggcacagaagaaacagcttccgcaaaacctgcctcaccctccggactggcaggcttcctgaaggcttcctcgcccgaaaccatcttggaaaaaacagttgccgaagtccaaacaccggaagagttgcacgatttcctgaaagtgtacgaaaccgatgccgtcgcggaaactgcgcctgaaacgcccgatttcaacgccgccgcagacgatttgtccgcattgcttcaacctgccgaagcaccgtccgttgaggaaaatataacggaaaccgttgccgaaacacccgacttcaacgccaccgcagacgatttgtccgcattacttcaaccttctaaagtacctgccgttgaggaaaatgcagcggaaaccgttgccgatgatttgtccgcactgttgcaacctgctgaagcaccggccgttgaggaaaatgtaacggaaaccgttgccgaaacacccgatttcaacgccaccgcagacgatttgtccgcattacttcaaccttctgaagtacctgccgttgaggaaaatgcagcggaaaccgttgccgatgatttgtccgcactgttgcaacctgctgaagcaccggccgttgaggaaaatgcagcggaaatcactttggaaacgcctgattccaacacctctgaggcagacgctttgcccgacttcctgaaagacggcgaggaggaaacggtagattggagcatctacctctcggaagaaaatatcccaaataatgcagataccagtttcccttcggaatctgtaggttctgacgcgccttccgaagcgaaatacgaccttgccgaaatgtatctcgaaatcggcgaccgcgatgccgctgccgagacagtgcagaaattgctggaagaagcggaaggcgacgtactcaaacgtgcccaagcattggcgcaggaattgggtatttga

SEQ ID NO: 70460 - DNA, 378 bp, Neisseria meningitidis
ttggcgcgtatcagccttgccttacaggttgttgccagccaatatacccaagttcccaccctgatttttgatgaggtcgataccggtattggagggggagtggctgaaatggtcggcaaggcattacgtgcgttgggcagaaaacatcaggtgcttgccgttacccaccttccccaagtcgcatcctgcggagaaaaccactggcgggtgcgcaagcacagcgagggagagcaaaccgtcagcgaaatcagtatattggatgaaatccaacggatcgaagaggttgcccgtatgttgggcggagaagtcattaccgatacgacgcggcaacatgcggcagaattgctgcaacttgcgtcgaaaaatagtttattttaa

SEQ ID NO: 70461 - DNA, 594 bp, Neisseria meningitidis
atggcaagcattcaagacttatacgaaaccgtcagccgcgttttgggcaatcaggcaggcaaagtcatttccgctttgggcgagattaccgttgagtgtctgcccgaacactatgtttcagtgatgactacgctgcgcgaccatgaagaactgcatttcgagcttctggttgacttgtgcggtgtcgattacagcacttacaaaaacgaagcatggcggggcaaacgctttgccgttgtcagccagctgctttccgttaaaaacaatcagcgcatccgcgtgcgcgtctgggtttcagacgacgacttccccgtagtcgaatccgtagtcaatatttacaacagcgcggattggtacgagcgcgaagccttcgatatgtacggcatcatgttcaacaaccatccggacttgcgccgcatcctgaccgattacggcttcgtcggacatccgttccgcaaagacttcccgatttccggctatgtggaaatgcgttacgacgaagagcaaaaacgcgtgatttaccaacctgttaccattgagccgcgcgagatcacgccgcgtatcgtccgtgaggagaactacggtggccaataa

SEQ ID NO: 70462 - DNA, 516 bp, Neisseria meningitidis; identical to SEQ ID NO: 55543

SEQ ID NO: 70463 - DNA, 723 bp, Neisseria meningitidis
atgaaacccgcctacttcatttccgacctgcatttgagcgaaaagcagcccgaactgaccgcgctgttgctgcgttttttacgttcttccgccgccgggcaggcgcgggcggtttacattttgggcgatttgtttgatttttgggtgggcgatgacgaagtttccgagttgaatacttcggttgcgcgtgaaatcaggaaattgtccgacaaaggcgttgccgtgttcttcgtcaggggcaaccgcgacttcctgattggtcaggatttttgccggcaggcaggcatgacgctgctgccggattactcggttttggacttgttcggctgcaaaaccctcatctgccacggcgacactctgtgtacggatgacagggcataccaacgtttccgcaaaatcgtgcatcggaagcggctgcaaaaactgttcctgatgctgcccctgaagtggcgcacgcgccttgccgccaaaatcaggcgcgtcagcaaaatggaaaaacaggtcaagcccgccgatattatggatgtcaatgccgcctttaccgcgcggcaggttcgcgcctttaacgcggaaaggctgatacacggacacacccaccgcgagcatatccatcacgaaaacggctttacccgcatcgttttgggcgactggcataacgactatgcttcaatcctccgcgtggacggggacggcgcggtattcgtgccgctggaaaaatgctga

SEQ ID NO: 70464 - DNA, 177 bp, Neisseria meningitidis
atgaaaagccgacgtttttttaaagccttattgttgattgccgcgctggtcggcgcgttttatgccggaatgcggacgcaggcgtatctttatgaagatttatgtttagacttgggtggcggcaaaaatccggggagttacccgatttgcgtgattgagaaagtccctgcacgttaa

SEQ ID NO: 70465 - DNA, 255 bp, Neisseria meningitidis; identical to SEQ ID NO: 55434

SEQ ID NO: 70466 - DNA, 537 bp, Neisseria meningitidis
  misc_feature 6, 7, 8, 9, 10: 'n' is a, c, g or t
gtgtgnnnnnaattcgtcagcgaccttttgtccgtcatcctgtttttcgccacctataccgttaccaaaaatatgattgccgcaacggcggtcgccttggttgccggtgtggttcaggcggcttttctgtattggaaatataaaaagctggatacgatgcagtgggtcggactggtgctgattgtgatattcggtggcgcaaccattgttttgggcgacagccgcttcattatgtggaagccgagcgttttgttttggctgggcgcgctgttcctgtggggcagtcacctcgccggtaaaaacggcttgaaggcgagtatcggcagggagattcagcttccggatgccgtatgggcgaaattgacgtatatgtgggtcggtttcctgatttttatgggtatcgccaactggtttgtgtttacccggttcgagtcgcaatgggtcaactataaaatgttcggctcgactgcactgatgcttgttttctttattattcagggtatttatctgagtatctgtctgaaaaaggaggattga

SEQ ID NO: 70467 - DNA, 225 bp, Neisseria meningitidis; identical to SEQ ID NO: 36622

SEQ ID NO: 70468 - DNA, 138 bp, Neisseria meningitidis
atgctaccgcgcaaattcaaaaatctcaaattccgacccaatcaacacacccgatgccccatgccaatagaaataccccacgccaataaaaaagtgccgaaaatcggcactaaaactgacaattttcaacactactaa

SEQ ID NO: 70469 - DNA, 741 bp, Neisseria meningitidis; identical to SEQ ID NO: 60308

SEQ ID NO: 70470 - DNA, 627 bp, Neisseria meningitidis; identical to SEQ ID NO: 36517

SEQ ID NO: 70471 - DNA, 1419 bp, Neisseria meningitidis
atggaaaatatattgtctgttctggtgggtacagtcaatcggttcctttgggactacctgctgatttacgcgcttttgggtatcggcctgttttttacgctgtatctcggtgcgccgcagattaccaagctgggcgcgggattcaaatccgtattcggcggcttgtttgccaaaggcgataaagacgacaagtctttatcgcagtttcaggcgttggcggttgccatatctgcgcaaatcggtacgggcaacgtcgccggcgtggcgaccgccatcaccgcaggcgggccgggcgcgattttttggatgtgggtttctgccgttttggggatgtccacgatttttgcggaggcactgctggcgcagaaataccgcgtcgtcagccacggcaaatacatcggcgggccggcgttctacatcacccacggtctgactccgaaaatcggcaggggcgcggcgcgtttcctgtcgggctttttctccattgcgttgattatcgcattgggctttatcggtaatgcgacacaggcaaactccattgcttctgccgttaccattgcatttgatgtgccttctttggcagtcggtattgtgcttgccgtccttgcgggcatggttgtgattggcggcgtgaaccgtattgccaatattgcccaatttgtcgtgccgtttatggcggttgtttatattttgtgcgccgtcgttatcctgtttgaattttccgaccatattgtgccgatgttcaaccacatctttaccgccgccttcaatcccgaagccgttttgggcggtgcggcgggtatcggtatgcgcgaagcgatacgtttcggcgtggcgcgcggtctgttttccaacgaagcaggtatgggttcgactccgcacgcccacgcgactgcggatgtgaagcatcctgtgcagcaaggtatggcggcatttgtcggtgtgtttatcgatacgattttggtatgtacggcaactgcgctgattatcctgctgaccgatgccaacctttcgggcgaacagggtgcggcggttactcaatttgcctttaacaaggcattcccgggcttcggttcgcaattgcttgccgtgtgtctgaccttcttcgcctttacgaccattatcggctggtattatttcggcgagtccaacatccgttttcttttcaggggaagacacttgggcatctatcgcgcattggttctgcttgccatcgttttgggtacgctcggcaaagtcgatttggtttggagcctgtccgatatgttcaacggctttatggttatcccgaacttgatagccctgtttttgttgcgtaaggaaatccgtgccatttatgatgattatttggcacagaaaaaagcgggtcgggatttgtcttatccgtatgaattccacgagttccacgacaagggctga

SEQ ID NO: 70472 - DNA, 624 bp, Neisseria meningitidis; identical to SEQ ID NO: 60631

SEQ ID NO: 70473 - DNA, 939 bp, Neisseria meningitidis
atggacgcctaccccgaagccgaagctccgccgcaaagcatcgtcgagctggttcccgtattgattgccgttaccgacggcggcctgcgggtattgaccgtcgcccaaggcacgctcctgcccaacggcccgctctcccccctgcgcaattccttgcaggcaggcgtaaaactgtgggtcgccaagcagacttcgcagcctatgggctatgtggaacagctttacacctttgtcgatacccaccgccgcaacgaacacggcatgcccgtcttgtacgtcagctatttggggctggtgcgtgaggcagccgacagcatcctgcatcccgatgcgaaatggcaggactgctacggctatttcccgtgggaagacttgcgcaccgacggcgggcagcgcgacgccgtcgtcggccgcctgcgcatttgggcaaactcggcggacacggaggaagtgcgtcaaatgcggctcaagcgcattcatttgtgctggggggtcgaaccggaaaactggtcggaagaatacgttttacaacgctatgaaatgctgtatgaaagcggtctgatagtggaagccgccgagccgcaggcaaacttcgacttcgcgctcacggggcagcccatgcgccacgatcaccgtcgcgtactggcgaccgccctgtcccgcctgcgcgccaaaatcaaataccgccccgtgatttttgaactgatgccgcccgaattcacgctgctgcaactgcaaaacagtgtcgaagccatcagcggaagattgctgcacaagcaaaacttccgccgccagattcagcagcaaaacctcatcgagccgtcggataccggcgtatcgggcagcaaaggccgtcccgcgcagctttgccgcttccgcgacgacgtcctgcccgacaggctgatttcggacatcggactgccgctgggcagccgttag

SEQ ID NO: 70474 - DNA, 639 bp, Neisseria meningitidis; identical to SEQ ID NO: 61715

SEQ ID NO: 70475 - DNA, 411 bp, Neisseria meningitidis
  misc_feature 396, 397, 398, 399, 400: 'n' is a, c, g or t
atgagcagcaacgcatggctgttttgggcattggcatcggcaggcttcgcctcattgaccgccatcttcgccaaaatgggtttacagggtatagattcagatttcgctaccttcatccgcaccttggtcatcctcgccgctttgttattgtttttaacctacaccggcaaatggcagggcgtgaacggctttacggggcacaactggacattccttatcctatccggccttgctaccggcgcatcttggcttgcctacttcaaagccctgcaactgggtaacgcctcgcaagtcgcccccgtcgacaaattcagcctggtcttggtcgcgctgatggcggtggttttcttggacgaacgcccgaacacgcaggaatggataggcttggggctggtnnnnncacacacttaa

SEQ ID NO: 70476 - DNA, 2163 bp, Neisseria meningitidis
atgcaacaaaaaatccgtttccaaatcgaaggcatgacctgtcaggcatgtgcttcgcgtattgaaaaagtgttgaacaaaaaagattttgtcgaatcggcgggagtgaacttcgccagcgaggaggcgcaggtagtgtttgacgacagcaaaacctcagtagccgacattgccaaaatcattgagaaaaccggttacggcgcgaaggaaaaaacggaagatacattgccgcaacccgaagcagaacaccatatcggctggcggctgtggctgctgttcaccatcaacgtcccgttccttatcggcatggcggggatgatgatcggcagacacgattggatgattccgccgttgtggcagttcgcattggcgagtgtggtgcagctttggctggcaatcccgttttacaaaagcgcgtgggcgagtattaaaggtggattggcgaatatggacgtgctcgttaccatcggcacggtatcgatttatctgtattccgtctatatgttatttttcagtccgcatgcggcacacggcatggcgcatgtgtattttgaagcaggcgtgatggtgatcggttttgtgtcgctgggcaaatttttggaacaccgtaccaaaaaatccagcctgaacagcttgggcctgcttttgaaacttacaccaacccaagtcaacgtgcaacgcaacggcgaatggaaacagcttcccatcgaccaagtgcaaatcggcgaccttatccgcgccaaccacggcgaacgcattgccgcagacggcatcattgaaagcggcagcggttgggcggacgagagccatcttaccggcgaatccaatcctgaagaaaaaaaggcgggcggcaaagtgttggcgggcgcgttaatgaccgaaggcagtgtggtgtaccgcgccacgcagctcggcagccaaacccagctcggcgacatgatgaacgcgctctctgaagcacaaggcagtaaagcaccgattgcgcgcgtagccgataaagcggctgcggtattcgtgcctgccgtcgtgggcattgcgttgttgacttttattgttacttggctgattaagggcgattggacggttgcgctgatgcacgccgtcgccgttttggtgattgcctgcccgtgtgcgctcggtctggctacacccgccgcgattatggtcggcatggataaagcagtgaaacacggcatttggtttaaagacgcagcggcaatggaagaagccgcccacgtcgatgccgttgtgttggacaaaactggcacgctgaccgaaggcaggccgcaggttgccgccgtttattgtgttcccgacagcggctttgacgaagacgatttgtaccgcatcgccgctgccgtcgaacaaaacgccactcatccgcttgcccgtgccatcgtttccgccgcccaaacgcgcagcttggaaatccctgccgcacaaaacgctcaaaccgttgtcggcgcaggcattgccgccgaagtggaagacgtgggtttggtgaaagcaggcaaagccgaatttgccgaacttaccttgcccgagttttcagacggcgtttgggacattgcaagcattgttgcagtctcggtcgataacaaacccatcggcgcattcgcacttgccgacgcgttgaaagccgataccgccgaagccataggccgtctgaaaaaacacaatatcgatgtctatattatgagcggcgacaaccaaggcacggtcgaatacgtcgccaaacaactgggcatcgcacacgccttcggcaacatgagtccgcgcgataaagctgccgaagtgcaaaaactcaaagccgccggcaaaaccgtggcgatggtcggcgacggcatcaacgacgcgcccgcgcttgccgccgctaacgtcagcttcgccatgaaaggcggagcggacgttgccgaacataccgcatccgccacgctgatgcagcattcggtcaaccaactcgccgatgctctgctggtgtcgcaagccactttgaaaaacatcaagcaaaacctgtttttcgccttcttctacaatatcttgggcattcctctcgccgcgcttggctttttaaatcccgtcatcgctggcgcggcaatggcggcaagctcggtttccgtgttgagcaatgccttgcgcctgaaacgggtaaaaatcgattag

SEQ ID NO: 70477 - DNA, 339 bp, Neisseria meningitidis; identical to SEQ ID NO: 55496

SEQ ID NO: 70478 - DNA, 783 bp, Neisseria meningitidis
ttgcagaaagtcgtgcgccatatcgcgcaaaccgaaattatgccgcgttttttgaatacgccgtcttgccgcaaggaagatggttcgatgttgagcgaggcggacattgccgcgcagacggcatttgccgccgcgttgccgcttctgatcgattgcccgatgttgggcgaggaaatgtcgcggcaggaacagtcggctttgtgggaacaatattcgggggaaaaggggctgtggattgtcgatccgatcgacgggacgaacaattttgtcaacgggctgccgcattttgcggtgtcggtggcgtttgtccgcaacgggcgtgcggaattgggcgtaatctacaacccggtcagcggcgaatgtttttatgccgaacgggggcagggtgcgtttcttaatggaacccgcctgcctttgcgtctcgtggataaaaaactcaatgaggcgattgcgggcgtggaaatcaaatatttgcgttcgggcaaactgtccagccgcatgagtacgctcgcgccttttggaacgatacggagtatgggcagcagtacgttggactggtgttatctggcgtgcgggcgttatgatgtttatgtccacggcgggcagaagctgtgggattatgccgccggcgcgttgattttcgaggaggcgggcggcaggctgacgactttggaaggcgacgggttttggagtggtgaacacgtgttcaaacgctcggtcgtcgccgcgctcgaaccgaagctgtttgaacgctgggtcgagtggatacgggaaaaccaatag

SEQ ID NO: 70479 - DNA, 1254 bp, Neisseria meningitidis; identical to SEQ ID NO: 55053

SEQ ID NO: 70480 - DNA, 2079 bp, Neisseria meningitidis
atgaaatcactcaaaaccttctcatttgagcatagtgtactggtcggcttagcatcctttaccactctggctctcagccgaggcgaacaggtcagcgcggtatggatggttaccgccgccatatccgtttactgcatcgcctaccgtttttacagcctctacatcgccaaccgcgtaatgcggctcgatcctaaccgcctgactccggcagaacgccacaacgacggcttggactacgttccgacgcacaagggcgtattgttcggacaccactttgccgcgattgccggcgcgggccctttggtcggccctgtactggctgcgcaaatgggttacctgcccggtactttgtggattatcttcggcgtggtttttgccggcgcggtacaggatatgatggtactgtttgtttctatgcgccgtgacggtaagtctttgggcgatattgtgaaacaggaactcggcactgtccccggcgtgattgcctccatcggtattttgatgattatggtcatcattatggcggtgttggcgttgattgtcgtaaaagcacttgttcacagcccttggggtacgtttaccatcgccgccactatgccgattgccctgtttatgggtatttacacgcgctatatccgtccgggcaaaatcggcgagatttccatcgtcggctttattttgctgatgctggcggtaatttacggcgaagatgtggcgaaaagttccatcggacattggttcgaccttgacggcatccagctcacttgggcgattatgatttacggctttgtcgcctccgtattgcccgtatggttgctgctcactccgcgcgactatctctccaccttcctgaaaatcggtacgattgcggccttggctttgggcatcgtcatcgtcaatcccactttgcaaatgcctgccgtaacccactttatcgacggttcgggtccggtattctcaggcgcattgttcccgttcctcttcatcaccatcgcctgcggtgcggtttcgggcttccacgcgctgatttcctccggcaccacgccgaaaatgctggaaaacgaaacccacgtccgtatgattggttacggcggtatgttgatggaaagtttcgtagccattatggcgcttgccgccgccgcatcgcttgatcccggcgtgtacttcgccatgaacagccctgccgccctgatcggtacggatgccaacaccgccgccgaagtgattaccaccaagctgcaattccctgtcgatgcggcaaccctgttgcataccgctaaggaagtgggcgaaaacaccatcctttcccgtgcaggcggtgcgccaaccctcgcagtcggtatggcgcacattatgagccgcctgattccgggcgaggcgatgatggcgttctggtatcacttcgccctattgtttgaagccttgttcatcctgaccgccgtcgatgccggtacgcgcgtcgcacgttttatgattcaagacttgggcagcatcttctacaaacctttcggcaacaccgactccatccccgccaacctgattgcgaccttcttcgccgtggcattgtggggctacttcctctacaccggcgtaaccgacccgctgggcggcatcaactcgctctggcctttgttcggcatcgccaaccaaatgctggcaggcgtggccttgattatgtgcgccgtggtgctgattaagatgaaacgcgaccgttatgtttgggtggtactcgttcccgccgtcggcgtactgttcgtaacctgctacgccggcctgcaaaaactgttccacagcgacccgcgcatcagcttccttgcccacgccggcaaatacagcgacgcattggctaaaaacgaagtccttgcgcctgccaaagacatcggcgaaatggcgcaaatcatcttcaacgacaagattaatgccggtctgaccatcctcttcttgtcggttgtcgtgattgtcgccgcgtacggtttgcgtaccgccctcaaagcacgcaaagtcggctggccgaccgccaaagaaatcccggcggtgtaccgcgacggcaagcagccggaggcacaaagtgaagcataa

SEQ ID NO: 70481 - DNA, 954 bp, Neisseria meningitidis; identical to SEQ ID NO: 54685

SEQ ID NO: 70482 - DNA, 810 bp, Neisseria meningitidis; identical to SEQ ID NO: 54386

SEQ ID NO: 70483 - DNA, 1128 bp, Neisseria meningitidis; identical to SEQ ID NO: 37891

SEQ ID NO: 70484 - DNA, 669 bp, Neisseria meningitidis; identical to SEQ ID NO: 60330

SEQ ID NO: 70485 - DNA, 999 bp, Neisseria meningitidis
atgagcagacccgtacccgccgtattcggcagcgtttttcacagtcaaatgcccgtcctcgcctaccgcgaaggcaaatggcagccgaccgaatggcaatcttcccaagacctctccctcgcaccgggtgcgcacgccctgcactacagcagcgaatgtttcgagggactgaaagccttccgtcaggcagacggcaaaatcgtactgttccgtccgactgccaacatcgcgcgtatgcggcaaagtgcggacattttgcacctgccgcgccccgaaacccaagcctatctcgacgcgctaatcgaattggtcaaacgcgccgccgatgaaattcccgatgcgcctgccgccctgtacctgcgtccgaccttaatcggtaccgatcccgtcatcggcaaggccggttctccttctgaaaccgccctgctgtatattttggcttcccccgtcggcgactatttcaaagtcggctcgcccgtcaaaattttagtggaaaccgaacacatccgctgcgccccgcatatgggccgcgtcaaatgcggcggcaactacgcttccgccatgcactgggtgctgaaggcgaaagccgaatacggcgcaaaccaagtcctcttctgcccgaacggcgacgtgcaggaaaccggcgcgtccaactttatcctgattaacggcgatgaaatcattaccaaaccgctgaccgacgaatttttgcacggcgtaacccgcgattccgtactgacggttgccaaagatttgggctataccgtcagcgaacgcaatttcacggttgacgaactcaaagctgcggtggaaaacggtgcggaggcgattctgaccggtacggcagccgtcatctcgcccgttacttccttcgtcatcggcggcaaagaaatcgaagtgaaaagccaagaacgcggctatgccatccgtaaggcgattaccgacatccagtatggtttggcggaagacaaatacggctggctggttgaagtgtgctga

SEQ ID NO: 70486 - DNA, 702 bp, Neisseria meningitidis; identical to SEQ ID NO: 54479

SEQ ID NO: 70487 - DNA, 1194 bp, Neisseria meningitidis
atgcaaaactatctgacccccaatttcgcctttgccccgatgattcccgaacgcgcttcaggcagccgcgtttgggatacgaaagggcgtgaatatattgatttttcaggcggtatcgccgtcaatgcgctgggacactgccaccctgcccttgtcgatgctttaaacgcgcagatgcacaagctgtggcacatttccaatatctatacgacgcgtccggcgcaggaattggcgcaaaaattggttgcaaacagttttgccgacaaggtttttttctgcaactcgggcgcggaagcgaatgaggcggcgttgaagctggcgaggaaatacgcccgcgaccgtttcggcggaggaaaaagcgaaatcgtcgcctgtatcaacagttttcacggacgcacgctgtttaccgtgtccgtcggcggccagccgaaatacagcaaggattatgcaccgctgccgcaaggcattacgcacgttccgttcaacgatattgccgcgctggaagctgccgtcggcgaacagacctgcgcggtcatcatcgagccgatacagggcgaaagcggcatcctgcccgccactgcggaatatttgcaaaccgcgcgccgtctgtgcgaccggcacaatgcgttgttgattttggacgaagttcaaaccgggatggggcatacgggcaggctgtttgcctatgaacattacggcattgttcccgatattttgagttcggcaaaagccttgggctgcggctttccgatcggcgcgatgctggcgacagaaaagattgccgccgccttccaaccgggcacgcacggctcgactttcggcggcaacccgatggcgtgtgcggtcggcagccgcgcattcgacatcatcaatacgcccgaaactttaaaccatgtccgtgaacaggggcagaaacttcagacggcattgctggatttgggcaggaaaacaggcttgttctcacaggttcgcgggatgggactgctgctcggctgcgtgttggacgcgccttatcgcggacacgcatccgaaataaccgccgccgccttgaaacacggcgtgatgattttggttgcgggtgcggacgtattgcgtttcgcgccttcgctgctgttgaacgatgaggatacggcggaaggtttgcggcgtttggaacacgtgctgacggaatttgccgccgcaaaccgcccctag

SEQ ID NO: 70488 - DNA, 1410 bp, Neisseria meningitidis
atgacagcacaaaccctctacgacaaactttggaacagccacgtcgtccgcgaagaagaagacggcaccgtcctgctctacatcgaccgccatttggtgcacgaagttaccagccctcaggcatttgaaggcttgaaaatggcggggcgcaagctgtggcgcatcgacagcgtcgtctccaccgccgaccacaacaccccgaccggcgattgggacaaaggcatccaagacccgatttccaagctgcaagtcgatactttggacaaaaacattaaagagtttggcgcactcgcctattttccgtttatggacaaaggtcagggcatcgtacacgttatgggccccgaacaaggcgcgaccctgcccggtatgaccgtcgtctgcggcgactcgcacacttccacccacggcgcattcggcgcactggcgcacggcatcggcacttccgaagtcgagcacaccatggcgacccaatgtattaccgcgaaaaaatccaaatccatgctgatttccgttgacggcaaattaaaagcgggcgttaccgccaaagacgtggcgctctacatcatcgggcaaatcggcacggcaggcggtacaggctacgccatcgagtttggcggcgaagccatccgcagcctttctatggaaagccgcatgactttatgcaatatggcgattgaggcaggcgcgcgctcaggcatggttgccgtcgaccaaaccaccatcgactacgtaaaagataaacccttcgcacccgaaggcgaagcgtgggacaaagccgtcgagtactggcgtacgctggtgtctgacgaaggtgcggtattcgacaaagaataccgtttcaacgccgaagacatcgaaccgcaagtcacttggggtacctcgcctgaaatggttttagacatcagcagcaaagtgccgaatcctgccgaagaaaccgatccggtcaaacgcagcggtatggaacgcgcccttgaatacatgggcttggaagccggtacgccattaaacgaaatccccgtcgacatcgtattcatcggctcttgcaccaacagccgcatcgaagacttgcgcgaagccgccgccatcgccaaagaccgcaaaaaagccgccaacgtacagcgcgtgttaatcgtccccggctccggtttggttaaagaacaagccgaaaaagaaggcttggacaaaattttcatcgaagccggttttgaatggcgcgaaccgggctgttcgatgtgtctcgccatgaacgccgaccgcctgaccccggggcaacgctgcgcctccacctccaaccgtaactttgaaggccgtcaaggcaacggcggacgtacccacctcgtcagccccgctatggcagcagcagcagccgttaccggccgctttaccgacatccgcatgatggcgtaa

SEQ ID NO: 70489 - DNA, 378 bp, Neisseria meningitidis; identical to SEQ ID NO: 36526

SEQ ID NO: 70490 - DNA, 624 bp, Neisseria meningitidis; identical to SEQ ID NO: 39191

SEQ ID NO: 70491 - DNA, 696 bp, Neisseria meningitidis; identical to SEQ ID NO: 38171

SEQ ID NO: 70492 - DNA, 1059 bp, Neisseria meningitidis; identical to SEQ ID NO: 61611

SEQ ID NO: 70493 - DNA, 1068 bp, Neisseria meningitidis; identical to SEQ ID NO: 55503

SEQ ID NO: 70494 - DNA, 1179 bp, Neisseria meningitidis
atggcatttttaaaactgaccgaacaaaacgtgcagggcaaaaccgtcctcattcgcgccgatatgaacgtgccgttcaaagacggcaaaatcagcgacgacacccgtatccgcgcctcacttgcgtccatcaaatactgcttggacaacggcgcgtccgtcatcgtgatgacccacttgggtcgcccgaccgaaggcgaattccattccgaagacgatgtcgcgcccgttgccgcgcacttgggcagcctgttgggcaaagacgtgaaagtattgaacgactggcgtgaaaacaaaccggctttgaacgcgggcgatgtcgtgatgctgcaaaacgtgcgtatcaacaaaggcgagaagaaaaacgatttggaactgggcaaagcctacgcttctttgtgcgacgtgttcgtcaatgacgcgttcggcaccgcgcaccgcgcccaagcctcgaccgaagccgtcgcccaagccgctcccgttgcctgcgccggcgtattgatggcgggcgaactcgacgctttgggcaaagccttgaaacagcccgcgcgcccgatggttgccatcgttgccggcagcaaagtgtccaccaagctgaccatcctcgaatcgctggcggacaaagtcgaccaactcatcgtcggcggcggtatcgccaacaccttcctgttggcggaaggtaaagccatcggcaaatctttggcggaacacgatttggtggaagaatccaaaaaaattatggcgaaaatggcggccaaaggaggttctgtgccgctgccgaccgatgtcgtcgttgccaaagcctttgccgccgatgccgaagcggtggtaaaagacattgccgacgttgccgaagacgagatgattttggacatcggcccgaaatctgccgccgcgcttgccgatttgcttaaagccgccgacacggtcgtttggaacggaccggtcggcgtgttcgagtttgaccagttcgcaggcggtacgaaagcccttgccgaagccattgcccaaagcaaagcgttctccattgctggcggcggcgacacgctggcggcgattgccaaattcggcgttaccgaccaaatcggctacatctccaccggaggcggcgcgttccttgagttcttggaaggtaaagagttgcctgccgtagccgctttggaaaaacgcggcgagtaa

SEQ ID NO: 70495 - DNA, 264 bp, Neisseria meningitidis; identical to SEQ ID NO: 55313

SEQ ID NO: 70496 - DNA, 702 bp, Neisseria meningitidis
  misc_feature 8, 9, 10, 11, 12: 'n' is a, c, g or t
gtgtgtgnnnnngatttgcaggttttgggtcaacgccacaaagacatcaaaaacggcctgtccgcgccgccgaaaccgaccatcgccaatttaatcaatctggcgaccaaaccggaatggtgcatgaaaatgctgaacacggaacgccgcacgttccgcaatatcgtcggacacgcgaagaacgtcggcgatttgtcttcgctgtcttcatggacttccgaacaattcgacccgcgcctgagctgggacgatgtggcgcgcattaaagatttgtggggcggcaagctgattatcaaaggcattatggaacccgaagacgcggaaaaagcagcgaaaagcggcgcggacgcattgattgtttccaaccacggcggccgacagctcgacgataccgtgtctgccatcaaagccttgcccgacatcgtcagcgcagtgggcagcgacatcgaagtttggatggacagcggcatccgcagcggtcaggatattttgaaggcgtgggctttgggcgcgaaaggtacaatgataggtcgggcgttcctgtatggcttgggcgcgtatggcgaagaaggcgtaacccgtgcgctggaaattctatataaagaaatggatatatctatggcgtttacgggacaccgcgatattcaagatgtcgatgcctcgattttaaggggtaaagattggggtagggaaacggtttag

SEQ ID NO: 70497 - DNA, 1836 bp, Neisseria meningitidis; identical to SEQ ID NO: 44240

SEQ ID NO: 70498 - DNA, 396 bp, Neisseria meningitidis; identical to SEQ ID NO: 54642

SEQ ID NO: 70499 - DNA, 2724 bp, Neisseria meningitidis
atgggtgttatgctatatcatcatagttatgccgaagatgcagggcgcgcgggcagcgaggcgcagatacaggttttggaagatgtgcacgtcaaggcgaagcgcgtaccgaaagacaaaaaagtgtttaccgatgcgcgtgccgtatcgacccgtcaggatatattcaaatccagcgaaaacctcgacaacatcgtacgcagcatacccggtgcgtttacacagcaagataaaagctcgggcattgtgtctttgaatattcgcggcgacagcgggttcgggcgggtcaatacgatggtggacggcatcacgcagaccttttattcgacttctaccgatgcgggcagggcaggcggttcatctcaattcggtgcatctgtcgacagcaattttattgccggactggatgtcgtcaaaggcagcttcagcggctcggcaggcatcaacagccttgccggttcggcgaatctgcggactttaggcgtggatgacgtcgttcagggcaataatacctacggcctgctgctaaaaggtctgaccggcaccaattcaaccaaaggtaatgcgatggcggcgataggtgcgcgcaaatggctggaaagcggagcatctgtcggtgtgctttacgggcacagcaggcgcagcgtggcgcaaaattaccgcgtgggcggcggcgggcagcacatcggaaattttggcgcggaatatctggaacggcgcaagcaacgatattttgtacaagacggccagttgaaattcaattccgacagcggaaaatgggagcgggacttgcaaagacaacagtggaaatacccgtggtataaaaaatacgaaaacccccaagaactgcaaaaatacatcgaagagcatgacaaaagctggcgggaaaacctggcgccgcaatacgacatcacccccatcgatccgtccagcctgaagcagcagtcggcaggtaatctgtttaaattggaatacgacggcgtattcaataaatacacggcgcaatttcgcgatttaaacaccaaaatcggcagccgcaaaatcatcaaccgcaattatcaattcaattacggtttatctttaaactcatatgccaacctcaatctgaccgcagcctacaattcgggcaggcagaaatatccgaaagggtcgaagtttacaggctgggggcttttaaaagattttgaaacctacaacaacgcgaaaatcctcgacctcaacaacaccgccaccttccggctgccccgcgaaaccgagttgcaaaccactttgggcttcaattatttccacaacgaatacggcaaaaaccgctttcctgaagaattggggctgtttttcgacggtccggatcaggacaacgggctttattcctatttggggcggtttaagggcgataaagggctgctgccccaaaaatcaaccatcgtccaaccggccggcagccaatatttcaacacgttctacttcgatgccgcgctcaaaaaagacatttaccgcttaaactacagcaccaataccgtcggctaccgtttcggcggcgaatatacgggctattacggctcggatgacgaatttaagcgggcattcggagaaaactcgccgacatacagggaacattgcaaccagagctgcggaatttatgaacccgtattgaaaaaatacggcaaaaagcgcgccaacaaccattcggtcagcattagtgcggacttcggcgattatttcatgccgttcgccagctattcgcgcacacaccgtatgcccaacatccaagaaatgtatttttcccaaatcggcgactccggcgttcacaccgccttaaaaccagagcgcgcaaacacttggcaatttggcttcaatacctataaaaaaggattgttaaaacaagatgatacattaggattaaaactggtcggctaccgcagccgcatcgacaactacatccacaacgtttacgggaaatggtgggatttgaacgggaatattccgagctgggtcagcagcaccgggcttgcctacaccatccaacaccgcaatttcaaagacaaagtacacaaacacggttttgagttggagctgaattacgattatgggcgttttttcaccaacctttcttacgcctatcaaaaaagcacgcaaccgaccaacttcagcgatgcgagcgaatcgcccaacaatgcgtccaaagaagaccaactcaaacaaggttatgggttgagcagggtttccgccctgccgcgagattacggacgtttggaagtcggtacgcgctggttgggcaacaaactgactttgggcggcgcgatgcgctatttcggcaagagcatccgcgcgacggctgaagaacgctatatcgacggcaccaacgggggaaataccagcaatgtccggcaactgggcaagcgttccatcaaacaaaccgaaacccttgcccgccagcctttgatttttgatttttacgccgcttacgagccgaagaaaaaccttattttccgcgccgaagtcaaaaatctgttcgacaggcgttatatcgatccgctcgatgcgggcaatgatgcggcaacgcagcgttattacagctcgttcgacccgaaagacaaggacgaagacgtaacgtgtaatgctgatggcttgtgcaacggcaaatacggcggcacaagcaaaagcgtattgaccaattttgcacgcggacgcacctttttgataacgatgagctacaagttttaa

SEQ ID NO: 70500 - DNA, 2664 bp, Neisseria meningitidis
gtgctgaagacaccccctacgcttgctgcagaactttcgggtaaaaccggtgtgagcattagcgcaccgtatgccaatgagaacagccgcatcagtctgagtgcggcaaacatcgaagctgaaaacggcaaaatcaaaattcaatcttacggtgaccaatattactatgcgagacagagcgaactctatacctttgaacgccgcagctacaaaactggcaaatggtacaaccgcaaacacattaccgaagtcaaagaacacaaaaacgccaagcccgacgcagtaaacctcagcgcatcccaaggcatcgacatcaaatctggtggcagcatcgacgcctacgccaccgcattcgatgcccccaaaggcagcattaacatcgaagccgggcggaaattgacactctatgccgtagaagagctcaactacgacaaactagacagccaaaaaaggcgcagatttctcggcatcagctacagcaaagcacacgacaccaccacccaagtcatgaaaaccgcgctgccctcaagggtagttgcagaatctgccaatctgcaatcaggttgggataccaaactgcaaggcacacagtttgaaaccacactgggtggcgcaaccatacgcgcaggcgtaggtgagcaggcacgggcagatgccaagattatcctcgaaggcatcaaaaccacgatccacaacgaaaccgtgagcagcagcaaatctgctctatggcaaaaacaggcaggacggggcagtaacatcgaaaccttgcaattgccgagtttcaccggtcccgttgcgcccgtactgtccgcacccggcggttacattgtcgatattcccaaaggcaatctgaaaaccgaaatcgaaaagctggccaaacagcccgaatacgcctacctgaaacagcttcagacggccaagaacgtcgattggaaacaggtgcagctggcctacgacaaatgggactataaacaggaaggcttgaccggagccggtgcagcgattgtggtgattattgtaaccgctctaacttatggatacggagcggctgcagcgggtagcgtaactgccgcaggaagtagtacagccgcagctgcaacaacgacagcggcagcaactaccactgtttctactgcagctgccatgcaaaccgcagctttagcctccttgtatagccaagcagctgtagccatcatcaataataaaggcgatgtaggcaaagcattaaaagatctcggcaccagtgatacggtcaagcagattgttacttccgcactgacggcgggtgcattaaaccagatgggagcagatattgcccaattgaacagcaaggtaagaaccgaactgttcagcagtacgggcaatcaaaccattgccaaccttggaggcagattggccaccaacctcagcaatgcaggtatctcagctggtatcaataccgccgttaacggcggcagcttgaaagacaacttaggcaatgccgcattgggagcattggttaatagcttccaaggggaagccgccagcaaaatcaaaacaaccttcagcgacgattatgttgccaaacagttcgcccacgctttggcgggttgtgttagcggactggtacagggaaaatgtaaagatggggcaattggcgcagcagttggggaaatcgtagctgaatccatacttggcggcagaaaccctgctacactcagcgatgcagaaaagcataaagttatcagttactcgaagattattgcgggcagcgtggcggcactcaacggcggcgatgtgaatactgcggcgaatgcggctgaggtagctgtggtgaataatgctttgaattttgacagcacccctaccaatgcgaaaaagcatcaaccgcagaagcccgacaaaaccgcactggaaaaaatcatccaaagtattatgcctgcacatgcggcaggtgcgatgactaatccgcaggataaggatgctgccatttggataagcaatatccgtaatggcatcacaggcccgattgtgattaccagctatggggtttatgctgcaggttggacagctccgctgatcggtacagcgggtaaattagctatcagcacctgcatggctaatccttctggttgtactgtcatggtcactcaggctgccgaagcgggcgcgggaatcgccacgggtgcggtaacggtaggcaacgcttgggaagcgcctgtgggggcgttgtcgaaagcgaaggcggctaagcaggctataccaacccagacagttaaagaacttgatggcttactacaagaatcaaaaaatataggtgctgtaaatacacgaattaatatagcgaatagtactactcgatatacaccaatgagacaaacgggacaaccggtatctgctggctttgagcatgttcttgaggggcacttccataggcctattgcgaataaccgttcagtttttaccatctccccaaatgaattgaaggttatacttcaaagtaataaagtagtttcttctcccgtatcgatgactcctgatggccaatatatgcggactgtcgatgtaggaaaagttattggtactacttctattaaagaaggtggacaacccacaactacaattaaagtatttacagataagtcaggaaatttgattactacatacccagtaaaaggaaactaa

SEQ ID NO: 70501 - DNA, 2106 bp, Neisseria meningitidis
atggctcgtaagaccccgatcagcctgtaccgtaacatcggtatttccgcccatatcgatgcgggtaaaaccacgacgacagaacgtattttgttctataccggtttgacccacaagctgggcgaagtgcatgacggtgcggctactaccgactacatggaacaagagcaagagcgtggtattaccattacctctgctgccgttacttcctactggtccggtatggcgaaacaattccccgagcaccgcttcaacatcatcgacaccccgggacacgttgactttaccgtagaggtagagcgttctatgcgtgtattggacggcgcggtaatggtttactgcgcggtgggcggtgttcaaccccaatctgaaaccgtatggcggcaagccaacaaataccaagtgccgcgcttggcgtttgtcaataaaatggaccgtcagggtgccaacttcttccgcgttgtcgagcaaatgaaaacccgtttgcgcgcaaaccctgtacctatcgtcattccggttggtgcggaagacaacttcagcggtgtggttgatttgttgaaaatgaaatccatcatttggaatgaagtcgataaaggtacaacctttacctatggcgatattcctgccgaattggtcgaaactgccgaagaatggcgtcaaaatatgattgaagccgcagccgaagccagcgaagaactgatggacaaatacttaggcggcgacgagctgaccgaagaagaaatcgtaggcgcgttgcgtcaacgtactttggcaggcgaaattcagcctatgctgtgtggttctgcatttaaaaacaaaggtgttcaacgtatgttggacgcagttgtagaattgctgccagctcctaccgatattcctccggttcaaggtgtcaacccgaataccgaggaagccgacagccgtcaagccagcgatgaagagaagttctctgcattggcgttcaaaatgttgaacgacaaatacgtcggtcagctgacctttatccgcgtttactcaggcgtagtaaaatccggcgataccgtattgaactccgtaaaaggcactcgcgaacgtatcggtcgtttggtacaaatgactgccgcagaccgtactgaaatcgaagaagtacgcgccggcgacatcgcagccgctattggtctgaaagacgttactaccggtgaaaccttgtgtgcggaaagcgcgccgattatcttggaacgtatggaattccccgagccggtaatccatattgccgttgagccgaaaaccaaagccgaccaagagaaaatgggtatcgccctgaaccgcttggctaaagaagacccttctttccgtgtccgtacagacgaagaatccggtcaaaccattatttccggtatgggtgagctgcacttggaaattattgttgaccgtatgaaacgcgaattcggtgtggaagcaaatatcggtgcacctcaagtggcttaccgtgaaactatccgcaaagccgttaaagctgaatacaaacatgcaaaacaatccggtggtaaaggtcaatacggtcacgttgtgattgaaatggaacctatggaaccgggtggtgaaggttacgagtttatcgatgaaattaaaggtggtgtgattcctcgcgaatttattccgtctgtcgataaaggtatccgcgatacgttgcctaacggtatcgttgccggctatcctgtagttgacgtacgtatccgtctggtattcggttcttaccatgatgtcgactcttcccaattggcatttgaattggctgcttctcaagcgtttaaagaaggtatgcgtcaagcatctcctgccctgcttgagccaatcatggcagttgaagtggaaaccccggaagaatacatgggcgacgtaatgggcgacttgaaccgccgtcgcggtgttgtattgggtatggatgatgacggtatcggcggtaaaaaagtccgtgccgaagtacctctggcagaaatgttcggttattcgaccgacctgcgttctgcaacccaaggccgcgctacttactctatggagttcaagaaatattctgaagctcctgcccacatagctgctgctgtaactgaagcccgtaaaggctaa

SEQ ID NO: 70502 - DNA, 771 bp, Neisseria meningitidis; identical to SEQ ID NO: 63816

SEQ ID NO: 70503 - DNA, 1209 bp, Neisseria meningitidis; identical to SEQ ID NO: 54443

SEQ ID NO: 70504 - DNA, 1011 bp, Neisseria meningitidis; identical to SEQ ID NO: 55225

SEQ ID NO: 70505 - DNA, 483 bp, Neisseria meningitidis; identical to SEQ ID NO: 61356

SEQ ID NO: 70506 - DNA, 1395 bp, Neisseria meningitidis; identical to SEQ ID NO: 55365

SEQ ID NO: 70507 - DNA, 843 bp, Neisseria meningitidis
atggatattaaaatcaacggcattaccgtcggtaacgatgctcctttcgtactgttcggcggcatcaacgttttagaagatttggattccaccctccaaacctgtgcgcattacgtcgaagttacccgaaaactcggtattccctatatctttaaagcctctttcgacaaggcaaaccgttcctccatccattcttatcgcggcgtaggcttggaagaaggcttaaagatttttgaaaaagtcaaagcagagttcggcatccccgtcattaccgacgtacacgaaccccatcagtgccaacccgtcgccgaagtgtgcgatgtcatccagcttcccgcctttcttgcgcggcagaccgatttggtggccgcaatggcggaaacgggcaatgtcatcaacatcaaaaaaccccagttcctcagcccttcgcaaatgaaaaacatcgtggaaaaattccgcgaagccggcaacgggaaactgattttatgcgaacgcggcagcagcttcggctacgacaacctcgttgtcgatatgctcggtttcggcgtgatgaaacaaacctgcggcaacctgccggttattttcgacgttacccattccctgcaaacccgcgatgctggttctgccgcatccggcggtcgtcgcgcacaggctttggatttggcacttgcaggcatggcaacccgccttgccggcctgttcctcgaatcgcaccccgatccgaaactggcaaaatgcgacggccccagcgcgctgccgctgcaccttttagaagattttttaatccgcatcaaagcattggacgatttaatcaaatcacaaccgattttaacaatcgagtaa

SEQ ID NO: 70508 - DNA, 2394 bp, Neisseria meningitidis
atgaaactgaaacagattgcttccgcactgatggtcttgggcatatcgcctttggcacttgccgacttcaccatccaagacatccgcgtcgaaggcttgcagcgtaccgagccgagcaccgtattcaactacctgcccgtcaaagtcggcgacacctacaacgacacacacggcagtgccatcatcaaaagcctgtacgccaccggtttctttgacgacgtacgcgtcgagactgcggacgggcagctcctgctgaccgttatcgaacgccccaccatcggctcgctcaacatcaccggcgcaaaaatgctgcaaaacgacgccattaagaaaaacctcgaatcgttcgggctggcgcagtcgcaatactttaatcaggcgacactcaatcaggcagtcgccggcctgaaagaagaatacctcgggcgcggcaaactcaatatccaaatcacgcccaaagtaaccaaactcgcccgcaaccgcgtcgacatcgacatcacgattgacgagggcaaatccgccaaaatcaccgacatcgaatttgaaggcaaccaagtctattccgaccgcaaactgatgcggcagatgtcgctgaccgaaggcggcatttggacatggctgacacgaagcaaccaattcaacgagcagaaatttgcccaagacatggaaaaagtaaccgacttctaccagaacaacggctacttcgatttccgcatcctcgataccgacatccaaaccaacgaagacaaaaccaagcagaccatcaaaatcaccgtccacgaaggcggacgtttccgttggggcaaagtctccatcgaaggcgacaccaacgaagtccccaaagccgaactggaaaaactgctgaccatgaagcccggcaaatggtacgaacgccagcagatgaccgccgttttgggtgagattcagaaccgcatgggctcggcaggctacgcatacagcgaaatcagcgtacagccgctgccaaacgccgaaaccaaaaccgtcgatttcgtcctgcacatcgaaccgggccggaaaatctacgtcaacgaaatccacatcaccggcaacaacaaaacccgcgacgaagtcgtgcgccgcgaattgcgccaaatggaatccgcgccttacgacacctccaagctgcaacgctccaaagagcgcgtcgagcttttgggctacttcgacaacgtacagtttgatgccgtcccgcttgccggcacacccgacaaagtcgatttgaacatgagcctgaccgaacgttccaccggctcgctcgacttgagcgcgggctgggtacaggataccggcctggtcatgtccgcaggcgtttcccaagacaacctgttcggtacgggcaagtcggccgccctgcgcgcctcacgaagcaaaaccacgctcaacggctcgctgtcgtttaccgacccgtacttcacggcagacggggtcagcctaggctacgatgtttacggaaaagccttcgacccgcgcaaagcatcgaccagcatcaaacaatataaaaccaccacggcaggcgcaggcatccgcatgagcgtgcctgttaccgaatacgaccgcgtgaatttcggtttggtggcagaacacctgaccgtcaacacctacaacaaagcgcccaaacactatgccgactttatcaaacaatacggcaaaaccgacggcacagacggcagcttcaaaggctggctgtacaaaggtaccgtcggctgggggcgcaacaaaaccgacagcgcgttatggccgacgcgcggctacctgacgggcgtgaacgccgaaatcgccctgcccggcagcaaactgcaatactactccgccacccacaaccaaacctggttcttccccctgagcaaaaccttcacactgatgcttggcggcgaaatcggctatgccaacggctacggcaaaaccaaagaaatccccttctttgaaaacttctacggcggcggcctgggttcggtacgaggttacgaaagcggcacacttggtccgaaagtctatgacgaatacggcgaaaaaatcagctacggcggcaacaaaaaagccaacgtctccgccgagctgctcttcccgatgcccggcgcgaaagacgcgcgcaccgtccgcctgagcctgtttgccgacgcaggcagcgtgtgggacggcaaaacctacgacgacaacagcagttccgcgaccggcggcagggttcaaaacatttacggcgccggcaatacccataaatccacctttaccaacgaattgcgctattccgccggcggcgcggttacctggctctcgcctttaggcccgatgaaattcagctacgcctacccgctgaagaaaaaaccggaagacgaaatccaacgcttccaattccaactcggcacgacgttctaa

SEQ ID NO: 70509 - DNA, 654 bp, Neisseria meningitidis; identical to SEQ ID NO: 54860

SEQ ID NO: 70510 - DNA, 384 bp, Neisseria meningitidis; identical to SEQ ID NO: 38550

SEQ ID NO: 70511 - DNA, 918 bp, Neisseria meningitidis; identical to SEQ ID NO: 60375

SEQ ID NO: 70512 - DNA, 678 bp, Neisseria meningitidis; identical to SEQ ID NO: 37180

SEQ ID NO: 70513 - DNA, 3309 bp, Neisseria meningitidis
atgaatgagggtgaagttgttttaacaccagaacaaatccaaaccttgcgtggttatgctttccgtggcgatacctatggcggttggcgttatttggctaatttgggtgaccgttatgcggatgatgctgctgcaattgtcggtaaggatgcaaacttaaatggtttgaatttatggatgaaaaaaggtgtggaaaacctatgggatgatacggtcggtaaaaagacccgtttagagaaatttgatcgggttgcattgcaacatttcagccaatatgtagatctaattaatgaaaataatggtagattacctaacactagtgaaattgagagaagttactataaagccgttaccgaaaatggtgtttcttctagtgcagctattgatttagttattaatcgctcacttccggatatggcagatggttattgggcattaggtttggggatagaagccgaacgtatccacaatgcgcaagcagtaaataatccgaacggtagcgaatgggataatagaaagcagttaatatctgctttagataaaggatttgatggatcttttaaagagaagcattttacttttttacaatctgtgataatggatgtaacaaagttaggtgttgaatatacaatagatggttggcaaaaaattggaggttggggtaatgggataatcaatgatttatataaaagtgttgcaaaaagagagtggactggaatatttgagatcgttaataataacatcaagcaatttagagatctgttcccaaatccggaaggctggatcgatgatggtcaccaatgtttcgctccttgggttaaagaaactaaaaaacgcaatggcaaatatcatgtctacgaccccctcgccctagatttggacggagacggtatagaaaccgttgccaccaaaggctttgcaggcagcttatttgatcacaccaacaacggtatccgcaccgccaccggttgggtttctgccgatgacggtttactcgtccgcgatttgaacggcaacggcatcatcgacaacggtgcggaactcttcggcgacaacaccaaactggcagacggttcttttgccaaacacggctacgcggctttggccgaattggattcaaacggcgacaacatcatcaacgcggcagacgccgcattccaaaccctgcgtgtatggcaggatctcaatcaggacggcatttcccaagctaatgaattgcgtacccttgaagaattgggtattcaatctttggatctcgcctataaagatgtaaataaaaatctcggtaacggtaacactttggctcagcaaggcagctataccaaaacagacggtacaaccgcaaaaatgggggatttacttttagcagccgacaatctgcacagccgcttcaaagacaaagtggaactcactgccgaacaggcaaaagccgccaatcttgcgggcattggtcgtctgcgcgatttgcgcgaagctgccgcattgtccggcgatttggccaatatgctgaaagcttattctgccgccgaaactaaagaagcacagttggcattgttagataatttgattcacaaatgggcggaaaccgattcgaactggggcaaaaaatcgccaatgcgactttcaaccgattggacgcaaacggctaatgaaggtattgcactgacaccatcccaagtagcacaactaaaaaagaacgctttagtttccctttctgataaagctaaagcaactattgacgccgcccgcgaccgcattgccgtgcttgatgcctacacggggcaggattccaacacactctattacatgagcgaggaagatgcgcttaatatcgtcaaagtaaccaacgatacatacgaccatctcgccaaaaacatctaccaaaacctgttattccaaacccgtttgcagccatatttgaatcaaatcagtttcaaaatggaaaatgatacgttcactttggattttagtggtcttgttcaagcatttaaccatgtcaaagaaactaatccgcaaaaagcttttgtggatttggccgagatgcttgcatatggcgaacttcgttcttggtatgaaggccgaagactaatggccgattatgtggaggaggcaaaaaaagcaggtaaatttgaagattaccagaaagtgttgggtcaggagaccgttgcattattagctaaaacatcgggtacgcaagcagatgatatcctgcaaaatgtaggctttggtcataataaaaatgtttctttatatggtaatgacggcaacgacactctgatcggcggtgcaggcaatgattacttggagggcggcagcggttcggatacttatgtcttcggcaaaggcttcggtcaggatacggtctataattacgactacgctaccggacgcaaagacatcatccgctttaccgacggtattacagccgatatgctgacttttacccgagagggcaaccatcttcttatcaaggcaaaagacggcagtggacaagtgactgttcagtcctatttccagaacgatggctcaggtgcttaccgtatcgatgagattcatttcgataacggcaaagtactggatgttgccactgtcaaaaaactggtacagcaatccaccgacggttcggacagattgtatgcctaccaatccggaagtaccttaaatggcggattgggcgatgactatctgtacggtgccgacgggaatgacctgctgaatggtgatgcaggcaacgacagtatctacagtggcaatggcaatgatacgctcaatggaggagaaggcaacgacgccctgtacggctataatggtaacgatgcactgaatggtggcgaaggcaatgatcatttgaacggcgaagacggtaacgacactctgatcggcggtgccggtaatgattacttggagggcggcagcggttcggatacttatgtcttcggcgaaggcttcggtcaggatacggtctataattaccatgtggataaaaactctgacactatgcactttaaaggatttaaagcagcagatgttcattttatccgttccggaagtgatttggtgcttagcgcttctgaacaagacaacgtacgtatttccggattcttctatggtgaaaaccatcgtgtagatacatttgtctttgatgatgcagctatcagtaatccagattttgccaagtatattaatgctggcaataatttggtacagtctatgtctgtgttcggttctaatactgctgcgacaggaggaaatgtggatgccaatacacaatccgtacagcagccgttattggtaacgccatctgcataa

SEQ ID NO: 70514 - DNA, 720 bp, Neisseria meningitidis
atgacacagcaaatcaaatacaaacgcgtattactgaaactctccggcgaatccctgatgggttccgatccgttcggcatcaatcacgataccatcgttcaaactgtcggcgaaattgccgaagtcgttaaaatgggcgtgcaagtcggtattgttgtcggcggcggcaatattttccggggcgtatccgcccaagcaggcagcatggatcgcgccaccgccgactacatgggcatgatggcgaccgtgatgaacgcgttggcactcaaagacgcatttgaaactttaggcatcaaagcgcgcgtacaatccgcactgtctatgcagcaaatcgctgaaacttacgcccgtcctaaagccatccaatatttggaagaaggcaaagtcgtgatttttgccgccggtaccggtaacccgttcttcacgaccgacactgccgccgcattgcgcggtgcggaaatgaactgcgacgtgatgctcaaagccaccaacgttgacggcgtgtacaccgcagaccccaaaaaagactcatccgccacgcgctacgaaaccattacttttgacgaagccttgttgaaaaacctcaaagtgatggatgccaccgctttcgccctctgccgcgaacgcaagctcaatattgtcgtattcggcattgctaaagaaggctcgctcaaacgtgtagtaaccggtgaaaacgaaggtacgctggttcactgctga

SEQ ID NO: 70515 - DNA, 465 bp, Neisseria meningitidis; identical to SEQ ID NO: 55305

SEQ ID NO: 70516 - DNA, 840 bp, Neisseria meningitidis; identical to SEQ ID NO: 55776

SEQ ID NO: 70517 - DNA, 339 bp, Neisseria meningitidis; identical to SEQ ID NO: 36369

SEQ ID NO: 70518 - DNA, 726 bp, Neisseria meningitidis
  misc_feature 703, 704, 705, 706, 707: 'n' is a, c, g or t
atgaatgagggtgaagttgttttaacaccagaacaaatccaaaccttgcgtggttatgctttccgtggcgatacctatggcggttggcgttatttggctaatttgggtgaccgttatgcggatgatgctgctgcaattgtcggtaaggatgcaaacttaaatggtttgaatttatggatgaaaaaaggtgtggaaaacctatgggatgatacggtcggtaaaaagacccgtttagagaaatttgatcgggttgcattgcaacatttcagccaatatgtagatctaattaatgaaaataatggtagattacctaacactagtgaaattgagagaagttactataaagccgttaccgaaaatggtgtttcttctagtgcagctattgatttagttattaatcgctcacttccggatatggcagatggttattgggcattaggtttggggatagaagccgaacgtatccacaatgcgcaagcagtaaataatccgaacggtagcgaatgggataatagaaagcagttaatatctgctttagataaaggatttgatggatcttttaaagagaagcattttacttttttacaatctgtgataatggatgtaacaaagttaggtgttgaatatacaatagatggttggcaaaaaattggaggttggggtaatgggataatcaatgatttatataaaagtgttgcaaaannnnncacacacttaattaattaa

SEQ ID NO: 70519 - DNA, 483 bp, Neisseria meningitidis; identical to SEQ ID NO: 36693

SEQ ID NO: 70520 - DNA, 2307 bp, Neisseria meningitidis; identical to SEQ ID NO: 55754

SEQ ID NO: 70521 - DNA, 639 bp, Neisseria meningitidis
  misc_feature 8, 9, 10, 11, 12: 'n' is a, c, g or t
gtgtgtgnnnnnaaggcgggcgacgatttcgtcatcaccgaaaacggccgcaagttttgggtcaaccttgataaatatttggatacggggctttttttggatcatcgaaacacgcgcaaaaaagtcggcgaaacggcggcgggcaaacgttttttaaacctgttttcctacaccggcagcttcaccgtctatgccgccaccggcggcgcggcatccagcgaaaccgtcgatttgtccaacacatatcttgattgggcgaaacgcaattttgaattgaacggcatcgatacggaacgacacaaaatcgtccgcgccgacgtgtttcaatatcttcagacggcatatggggaaggcaggcggttcgacctcattgtgatggacccgcccagcttctccaacagcaaaaagatgctcgacattctcgacatccagcgcgaccacaaaaagctgattgacggcgcggtgaagctgctcgcttcagacggcattttgtacttttccaacaacctgcgcagcttcgtcttagacgacttggtatcggaacaatacgccgtcaaagacatttccaaacaatccgttcccgaagatttccgcaacaaaaaaatccataggtgctgggaaatccgccacaaatcttaa

SEQ ID NO: 70522 - DNA, 402 bp, Neisseria meningitidis
atgaaagacaagcacgattcttccgccatgcggctggacaaatggctttgggcggcacgttttttcaagacccgttcccttgcgcaaaagcacatcgaactgggtagggttcaagtaaacggctcgaaggtcaaaaacagtaaaaccatagacatcggcgatattatcgacctgacgctcaattcccttccctataaaatcaaggttaaaggtttgaaccaccaacgccgcccggcatccgaggcgcgacttctgtatgaagaagacacgaaaacagcaacattgagggaagagcgcaaacagctcgaccaattcagccgcatcacttccgcctatcccgacggcagaccgaccaagcgcgaccgccgccaactggacaggctgaaaaaaggagactggtaa

SEQ ID NO: 70523 - DNA, 288 bp, Neisseria meningitidis
ttggatctcgcctataaagatgtaaataaaaatctcggtaacggtaacactttggctcagcaaggcagctataccaaaacagacggtacaaccgcaaaaatgggggatttacttttagcagccgacaatctgcacagccgcttcaaagacaaagtggaactcactgccgaacaggcaaaagccgccaatcttgcgggcattggtcgtctgcgcgatttgcgcgaagctgccgcattgtccgggcgatttggccaatatgctgaaagcttattctgccgccgaaactaa

SEQ ID NO: 70524 - DNA, 474 bp, Neisseria meningitidis; identical to SEQ ID NO: 36318

SEQ ID NO: 70525 - DNA, 777 bp, Neisseria meningitidis
atgaaagacgtcgccttcgcgtatggcgaccgcccgattctgaagaacatcaatttcagcattccgcaaggcaattttgctgccgtaatgggcggttcgggcagcggcaaaaccacgctgatgcgactgattacaggacagattcgtccgcagtccgggcaggttttgattgaaggacgggatttggcgggcttttcggctgacgagttgtatgaacaccgccgccgtatgggcgtattgttccaacacggcgcgctgtttaccgatttgtctgtatttgacaatattgcttttccgatgcgcgaactgacgcgcctgccggaagcggtgattcgagatttggttttgttgaaactgaacgcggtcgggctgcgcggcgtggaaaacctgatgccgtccgagttgtccggcgggatgtcgcgccgcgtcgcgcttgcccgcacaatcgcgctcgatcccgaaattatgttgtacgacgagccgtttaccggtctcgatccgatttccttgggcgtgattgcccacttgatcagccgcgtcaacaaggctttgcgttcgaccagtattatggtcacgcacgacattgaaaaatctttggaaatcgtcgatcaggtgattttcttggcgcacggcgaaattatgttctccggctcgccgcaggaaatgcgcgaactggattcgccttgggtgcgccagtttgtcggcgggctggcagacggccccgtggcataccgttatccggcgcaaacgtcgttgcagcaggatttgctcgggtaa

SEQ ID NO: 70526 - DNA, 270 bp, Neisseria meningitidis; identical to SEQ ID NO: 60624

SEQ ID NO: 70527 - DNA, 300 bp, Neisseria meningitidis; identical to SEQ ID NO: 60674

SEQ ID NO: 70528 - DNA, 1419 bp, Neisseria meningitidis
atgtctattaaaaacgtcgtaaaattgattgaagaaagcgaagcccgctttgtcgatttgcgctttaccgataccaaaggcaagcagcaccactttaccgtgcctgcacgcatcgtgttggaagaccctgaagagtggtttgaaaacggtcaggcatttgacggttcgtctatcggcggctggaaaggcattcaggcttccgatatgcagctgcgtcccgatgcgtctacagccttcgttgatcctttttatgatgatgttaccgtcgtcattacctgcgacgtcatcgaccctgccgacggtcagggttacgaccgcgacccgcgctccatcgcacgccgcgccgaagcctatttgaaatcttccggtatcggcgacacggcatacttcggccccgaacccgagtttttcgtcttcgacggcgtagaatttgaaaccgatatgcacaaaacccgttacgaaatcacgtccgaaagcggcgcatgggcaagcggtctgcatatggacggtcaaaacaccggccaccgccccgccgttaaaggcggttacgcgcccgtcgcgccgattgattgcggccaagatttgcgctccgccatggtgaacattttggaagaactcggcatcgaagtcgaagtccaccacagcgaagtcggtaccggcagccaaatggaaatcggcacgcgtttcgccaccttggtcaaacgcgccgaccaaacccaagacatgaaatatgtgattcaaaacgttgcccacaacttcggcaaaacagccacctttatgcccaaaccgattatgggcgacaacggcagcggtatgcacgttcaccaatccatttggaaagacggtcaaaacctgttcgcaggcgacggctatgccggcttgagcgacaccgcgctctactacatcggcggcatcatcaaacacgccaaagccttgaacgcgattaccaatccgtccaccaactcctacaaacgcctcgtgccgcactttgaagcgccgaccaaactggcatactccgccaaaaaccgttccgcttccatccgcattccgtccgtgaacagcagcaaggcgcgccgcatcgaagcgcgtttccccgatccgaccgccaacccgtatttggcatttgccgccctgttgatggcgggtttggacggcattcaaaacaaaatccatccgggcgaccctgccgataaaaacctgtacgatctgccgccggaagaagatgcattggtgccgaccgtttgcgcttctttggaagaagcactggccgccctcaaagccgaccacgaattcctcctgcgcggcggcgtgttcagcaaagactggatcgacagctacatcgctttcaaagaagaagacgtacgccgcatccgcatggcgccgcacccgctggaatttgaaatgtattacagcctgtaa

SEQ ID NO: 70529 - DNA, 906 bp, Neisseria meningitidis; identical to SEQ ID NO: 55412

SEQ ID NO: 70530 - DNA, 903 bp, Neisseria meningitidis
atgagcatcatccactacctctcgctgcacgtcgaatccgcgcgcaccgcgctcaaacagcttctgcgccaacctttcggcacactgcttaccctcataatgctcgccgtcgccatgaccctgccgctgtttatgtatttgggcatccaaagcgggcaaagcgtgttgggcaaactcaacgagtcgccgcaaatcacaatctatatggaaaccgccgccgcacaaagcgacagcgataccgtgcgcagcctgctggcgcgcgacaaacggctcgacaacatccgcttcatcggcaaagaagacggtctggaagaattacagtccaatctcgaccaaaatctgatttccatgcttgacggcaaccccctgccggatgtctttatcgttacccccgacccggcaaccacgcccgcccaaatgcaggcaatctaccgggacattaccaaactgcctatggtcgaatccgcgtctatggataccgaatgggtgcaaacgctgtaccaaatcaacgagttcatccgcaaaattttatggtttctttccctgacgctggggatggcgttcgtccttgtcgcgcacaacaccatccgcctacaaatcctcagccgaaaagaagaaatcgaaatcaccaaactcttgggcgcgcccgcgtcgtttatccgccgccccttcctttatcaggcaatgtggcagagcatcctttccgccgccgtcagcctggggctttgcggttggctgctctctgccgtgcgccccttggttgatgccatcttcaaaccctacggcttgaacatcggctggcgtttcttctacccgggagaaatcgcgctggtgttcggctttgtcgtcgcactggggatattaggggcatggcttgccaccaccaacacctgctcggtttaa

SEQ ID NO: 70531 - DNA, 789 bp, Neisseria meningitidis; identical to SEQ ID NO: 66370

SEQ ID NO: 70532 - DNA, 330 bp, Neisseria meningitidis; identical to SEQ ID NO: 60433

SEQ ID NO: 70533 - DNA, 525 bp, Neisseria meningitidis
  misc_feature 502, 503, 504, 505, 506: 'n' is a, c, g or t
atggcaggccatagcaagtgggcgaatatccagcataaaaaagcccgtcaggatgccaaacgcggcaaaatcttcacccgtttaatcaaagaaatcaccgttgcggcgcgtatgggcggcggcgaccccggtgccaacccgcgcctgcgcctggctttggaaaaagcagccgaaaacaatatgcccaaagacaatgtgcaacgcgccatcgataaaggtacgggcaacttggaaggcgtggaatacatcgagttgcgctacgaaggctacggcatcggcggcgcggctttgatggtggactgcctgaccgacaacaaaacccgcaccgttgcggacgtacgccacgcgtttaccaaaaacggcggcaacttgggtaccgacggctgcgtggcgttcaacttcgtgcatcagggctatttggtattcgaacccggcgttgacgaagacgcgctgatggaagcggctttggaagccggtgcggaagacgtggttaccaacgacnnnnncacacacttaattaattaa

SEQ ID NO: 70534 - DNA, 1761 bp, Neisseria meningitidis
atgcgtaccaactattgcggtctgatcagtgagcaatacttagaccaaaccgttaccgtcaaaggctgggtacaccgtcggcgcgaccacggcggtgtgatttttatcgacctgcgcgaccgcgaaggcatcgtccaagtcgtgattgaccccgacacgcccgaagcgtttgccgctgccgattccgctcgcaacgaatacgttttgagcattaccggccgcgtacgcaaccgtcccgaaggtacgaccaacgacaaaatgatttccggcaaaatcgaaatccttgccaaagaaatcgaagtcttgaacgccgccgccacgccgccgttccaaatcgacgatgaaaacatcagcgaaaacgttcgcctgaccaaccgcgttatcgacttgcgccgtccggtgatgcaacgcaacctgcgcctgcgttatcaagtcgctatgggcgttcgccgttatctggacgcgcaaggcttcatcgacatcgaaacgccgatgctgacccgctccactccggaaggcgcgcgcgactacctcgtgccgagccgcgttcatccgggcgagtttttcgcgctgccgcaatcaccgcaattatttaagcaactgttgatggtggccggtttcgaccgttactatcaaattaccaaatgtttccgtgacgaagacttgcgtgccgaccgtcagcctgaattcactcaaatcgacttggaaacctcgttcttgaacgaggatgaaattatggacatcaccgaaggtatggcgaaacaagtcttcaaagatgctttaaacgtagatttaggcgacttcccgcgtatgccttacgccgaagccatgttctactacggctctgacaaaccggatatgcgtatcaacttgaaatttaccgagttgaccgacctgatgaaaacggaagaattcaaagtcttccgtggcgcggcagatatgaaaggcggccgtgtagtcgccctgcgcgtaccgaacggcgcaaaattcagccgcaaagaaatcgacgaatacactaaatttgtcggcatctacggcgcgaaaggtctggcatacatcaaagtaaacgatgtgggcaacctctcaaacggcgaagacagcggcctgcaatctccaatcgtaaaattcctgtctgagaatgccctgaaagaaatcatcgagcgtaccggcgcacaaaacggcgatattattttcttcggtgcggacaaaaccaaagttgtgaacgaagccatcggcgcattgcgtatcaaagtcggcttggaacacggcaaagacaacggctacttcacagacgaatggaaacctttgtgggttgtcgatttcccaatgttcgaatacgacgaagaagccgaccgctacgttgccgtacaccatccgtttaccgcgcctaaagaaggtcatgaagacctgatggtttccgaccctgcaaactgcctggcccgtgcctacgacatggtattgaacggctgggaaatcggcggcggctctatccgtatccaccgtgcagacgtacaagagaaagtgtttgccgcgctgaaaatcagccctgaagagcaacaagagaaattcggcttcctcttggacaacctgaaattcggtgcgcctcctcacggcggccttgcattcggcctcgaccgtttggttaccctgatgaccggcgccgaatcctatccgcgacgtgattgccttcccgaaaacacaacgtgcccaatgcctgctgaccaacgcgcccaacagcgtggacgacaagcagttgcgtga

SEQ ID NO: 70535 - DNA, 474 bp, Neisseria meningitidis; identical to SEQ ID NO: 55126

SEQ ID NO: 70536 - DNA, 1122 bp, Neisseria meningitidis; identical to SEQ ID NO: 54241

SEQ ID NO: 70537 - DNA, 1161 bp, Neisseria meningitidis
atgcgaaaaaaacttaccgccctcgtattgtccgcactgccgcttgcggccgttgccgatgtcagcctgtacggcgaaatcaaagccggcgtggaaggcaggaacatccagctgcaattgaccgagcagccctcaaaggctcaaggtcaaacgaacaatcaggtaaaagttactaaggcaaaaagccgcatcaggacgaaaatcagcgatttcggctcgtttatcggctttaaggggagcgaggatttgggcgaagggctgaaggctgtttggcagcttgagcaagacgtatccgttgccggcggcggcgcgacccagtggggcaacagggaatcctttatcggcttggcaggcgaattcggtacgctgcgcgccggtcgcgttgcgaatcagtttgacgatgccagccaagccattgatccttgggacagcaataatgatgtggcttcgcaattgggtattttcaaacgccacgacgatatgccggtttccgtacgctacgactctccggacttttccggtttcagcggcagcgtccaattcgttccggctcaaaacagcaagtccgcctatacgccggcttatgtggatgagaagcaggtgtctcatgcggctgttgtcggcaagcccggatcggatgtgtattatgccggtctgaattacaaaaatggcggatttgccgggagctatgcctttaaatatgcgaaacacgccaatgaggggcgtgatgctttctttttgttcttgctcggcagcgggagtgatgaagccaaaggtaccgatcccttgaaaaaccatcaggtacaccgcctgacgggcggctatgaggaaggcggcttgaatctcgccttggcggctcagttggatttgtctgaaaatgccgacaaaaccaaaaacagtacgaccgaaattgccgccactgcttcctaccgcttcggtaatgcagttccgcgcatcagctatgcccatggtttcgactttatcgaacgcggtaaaaaaggcgaaaataccagctacgatcaaatcatcgccggcgttgattatgatttttccaaacgcacttccgccatcgtgtctggcgcttggctgaaacgcaataccggcatcggcaactacactcaaattaatgccgcctccgtcggtttgcgccacaaattctaa

SEQ ID NO: 70538 - DNA, 438 bp, Neisseria meningitidis; identical to SEQ ID NO: 43498

SEQ ID NO: 70539 - DNA, 387 bp, Neisseria meningitidis; identical to SEQ ID NO: 43371

SEQ ID NO: 70540 - DNA, 360 bp, Neisseria meningitidis
  misc_feature 337, 338, 339, 340, 341: 'n' is a, c, g or t
atgaagccagtaaacatcggtcttttaggtttgggtacggtcggcggcggtacggctgccgtgttgcgggacaacgcggaggaaatttcccgtcgcttggggcgcgaaatccgtatttctgccgtgtgcgatttgagtgaagaaaaagcccgacaaacctgcccgtccgcagcctttgtcaaagatccgttcgaactggtcgcacgtgaagacgtcgatgtcgtcgtcgaattgttcggcggtaccggcattgccaaagatgcggtgttgaaagccattgaaaacggcaaacacatcgttaccgccaacaaaaaactgctcgccgaatacggcaacnnnnncacacacttaattaattaa

SEQ ID NO: 70541 - DNA, 291 bp, Neisseria meningitidis; identical to SEQ ID NO: 55030

SEQ ID NO: 70542 - DNA, 2397 bp, Neisseria meningitidis
atgattaaaaagattttaacgacttgttttggtttggtttttgggttttgtgtatttggagtgggtttggttgccattgctattttggtaacgtatccgaaactgccgtctttggattctttgcagcattaccagcctaaaatgccgttgactatttattcggcggatggggaagtcatcggtatgtatggggagcagcggcgcgaatttacaaaaatcggcgatttcccagaggtgttgcggaatgcggttatcgccgccgaggataaacgcttttaccggcattggggggtggatgtttggggtgttgcccgcgctgccgtcggcaatgtcgtgtccggcagcgtgcagtcgggtgcgagtacgattacgcagcaggtggcgaaaaatttttatttgagcagtgaaaaaacgttcacacgcaaattcaatgaggtgttgcttgcctataaaatcgagcagtctttaagcaaagacaaaatcctcgagttgtatttcaatcagatttacctcggtcagcgcgcctatggttttgcatctgccgcgcaaatctatttcaataagaatgtccgagatttgactttggcggaagccgccatgcttgcgggactgcccaaggctccgtctgcctataatccgattgttaatccagaacgtgccaagttgcgccagaagtatattttgaacaatatgctcgaggagaagatgattaccgtgcaacagcgcgatcaggcgttgaatgaggaactgcattacgagcggtttgttcggaaaatcgatcagagtgctttatatgtggcggaaatggtgcgtcaggaactgtatgagaaatacggtgaagatgcctatacgcagggttttaaggtttataccacggtccgcgccgatcatcagaaggtggcaaccgaggcattgcgcaaggctctacggaatttcgatcgcggcagcagctaccgcggtgcggaaaactatatcgatttgagtaagagtgaagatgtcgaggagactgtcagccagtatctgtcgggactctataccgtcgataaaatggttcccgccgttgtgttggatgtgactaaaaagaaaaatgtcgtcatacagctgcccggcggcaggcgggttacgcttgacaggcgcgccttgggctttgcggcccgcgcggtcaataatgaaaaaatgggggaggaccgtatccgcaggggcgcggtcatccgtgtcaaaaacaacggcgggcgttgggcggtggttcaagagccgttgctgcagggggctttggtttcgctggatgcaaaaaccggagctgtgcgcgcgctggtcggcggttatgattttcacagcaaaacattcaatcgtgccgttcaggcaatgcggcagccgggttcgacctttaagccgtttgtctattcggcggcattatctaaggggatgaccgcgtccacagtggttaacgatgcgccgatttccctgccggggaaagggccgaacggttcggtctggacacctaaaaattcagacggcagatattccggctacattactttgagacaggctctgacggcttccaagaatatggtttccatccgtattttgatgtctatcggtgtcggttacgcgcaacagtatatccggcgtttcggcttcaggtcgtccgagctgccggcaagcctgtctatggctttaggtacgggcgagacaacgccgttgaaagtggcggaggcatatagcgtatttgcgaacggcggatatagggtttcttcgcacgtaatcgataagatttatgacagagacggcaggttgcgcgcccaaatgcaacctttggtggccgggcaaaatgcgcctcaggcaatcgatccgcgcaatgcctatattatgtataagattatgcaggatgtggtccgtgttggtacggcaaggggggcagctgcgttgggaagaacggatattgccggtaaaacgggtacgaccaatgacaataaggatgcgtggtttgtcggttttaaccctgatgtggttactgccgtatatatcggcttcgacaaacctaagagtatggggcgtgtcggctacggcggtacgattgcggtgccggtttgggtggactatatgcgttttgcgttgaaaggaaagcagggcaaggggatgaaaatgcctgaaggtgtggtcagcagcaatggcgaatactatatgaaggaacgtatggtaaccgatccgggcttgacgctggacaacagcggtattgcgccgcaaccttcccgacgggcaaaagaagatgacgggggcgcggcagaaggcggacggcaggcggcggatgacgaagtccgccaagatatgcaggaaacgccggtgcttccgagtaatactggttccaaacagcagcagttggattctctgttttaa

SEQ ID NO: 70543 - DNA, 1227 bp, Neisseria meningitidis; identical to SEQ ID NO: 61868

SEQ ID NO: 70544 - DNA, 1089 bp, Neisseria meningitidis; identical to SEQ ID NO: 54909

SEQ ID NO: 70545 - DNA, 846 bp, Neisseria meningitidis; identical to SEQ ID NO: 36227

SEQ ID NO: 70546 - DNA, 1074 bp, Neisseria meningitidis
atgagtatcaccatccaaaacttaaacaaacacttcggcaattttcacgcgctgaaaaacatcaacctcaacgtccccaccggcaaactcgtttccctgctcggcccgtccggctgcggcaaaaccacacttttacgcattatcgccggactggaaaacgccgacggcggccaaatcctctttgacgggcaagacgtaaccgccaaacacgtgcgcgagcgcaaagtcggcttcgtgttccaacactacgccctcttccgccacatgaacgtgtttgacaacgtcgctttcggtttgaccgtattgcccaagtccgaacgcccgtccaaagaacaaatctgcactaaagtcgaagaattgctgaaactcgtacaactctcgcatttggcaaaatcctatccgcaccaactctccggcgggcaacgccagcgcatcgccctcgcccgcgcgcttgcggtcgaacccaaactcttgcttttggacgaacccttcggcgcgttggatgccaaagtacgcaaagaattacgcacctggctgcgcgacatccatcacaacctgggtgtaaccagcattctggttacgcacgaccaagaagaagccctcgaagtttccgacgaaatcgtcgtgatgaaccacggcaaaatcgaacaaaccggcagtgccgaagccatttaccgcaaacccgaaaacgccttcgttaccgagttcctcggcgaaaccgacgcttttgaaggacgcatcgaaaaaggcttctggcattataacggcttcgcgtggaaattggacgcacaatacaaatggcaggaacaaaccgccaccggctatatccgcccgcacgaatggcagatcgccgccgaacacgaaacaccgatgatttgtgccgaaatcgaaaaagtccacgccgtcggcgcattgacgcatattttggtgaaacacggcaaacaagacgtgcatatcacgctggctggcagcgatgccgcgcgttacccaatcgccgaaggcaaagaattgaagctgattccgaaacaggtttatgtcttctctcaaaacgaactgattgaatattcgatttaa

SEQ ID NO: 70547 - DNA, 564 bp, Neisseria meningitidis; identical to SEQ ID NO: 38408

SEQ ID NO: 70548 - DNA, 1092 bp, Neisseria meningitidis
atgagtttgaaatgcggcatcgtcggtttgcccaacgtcggcaaatccaccctttttaacgcgctgacccaatcgggtatcgaagcggcaaactatcctttctgtaccatcgaacccaacgtcggcatcgtcgaagtccccgatccgcgtatggccgaattggcaaaaatcgtcaatccgcaaaaaatgcagcctgccatcgtcgaatttgtcgatattgccggtttggttgcaggcgcgagcaaaggcgagggcttgggcaaccagttccttgccaacatccgcgaaaccgacgcgattgtgaatgtcgtgcgctgctttgacgacgacaatatcgtccacgttgcaggccgcgtcgatccgattgccgacatcgaaaccatcggtacagagttggcgcttgccgacctggcaagtgtcgaaaaagccatcgtccgcgaagaaaaacgcgcccgctccggcgacaaagacgcgcaaaaactggtcgaactgtgcaaaaaactgctgccgcatttggacgaaggcaaacccgtgcgttccttcggtttggacgcggaagaacgcgcgatgctcaaaccgctgttcctgctgaccgccaagccggcgatgtatgtgggcaacgttgccgaagacggttttgaaaacaatccgcacctcgaccgcctgaaagaattggcggcaaaagaaaacgcccccgtcgtcgccgtgtgcgccgcgatggagagcgaaatcgccgagttggaagacggtgaaaaagccgagttcctcgccgaaatgggcttggaagaaccgggcctgaaccgcctgattcgtgccggttacgacctcttgggcctgcaaacctacttcaccgccggtgtcaaagaagtccgcgcctggaccatccacaaaggcgacaccgcgcctcaagctgccggcgtaatccataccgacttcgaacgcggcttcatccgcgcccaagtgattgcctacgatgattttgtctcgctcggcggcgaagccaaagccaaagaagccggcaaaatgcgtgtggaaggcaaggaatacgtcgtgcaggatggggatgtgatgcactttttgtttaacgtgtaa

SEQ ID NO: 70549 - DNA, 732 bp, Neisseria meningitidis; identical to SEQ ID NO: 55917

SEQ ID NO: 70550 - DNA, 2376 bp, Neisseria meningitidis
atgaataaaaatattaaatctttaaatttacgggaaaaagacccgtttttaagtcgtgaaaaacagcgttatgaacatcctttgcccagtcgggaatggataatcgagctgcttgaacgtaaaggcgtaccatccaagattgaagctttggtacgcgaattgtcgattaaggaagaagagtacgaatttttcgaacgtcgtctgaaggcgatggcgcgggacggtcaggttttaatcaaccgtcggggcgcggtttgcgcggcggacaaattggatttggtcaaatgccgtgtcgaggcgcacaaagacggcttcggtttcgccgtgccgctcacgcccgccaaagacggtgattttgttttgtacgaacgccagatgcgcggcattatgcacggcgatattgtcactgttcgtcctgccggcatggaccgtaggggccgccgcgaagggacggttctggatattgtcgaacgcgcgcaaagcaaagttgtcggccgtttctatatggataggggcgtggcgattttggagccggaagacaagcgtctgaaccaaagcatcgtattggaaccggacggcgtggcgcgtttcaaacctgaatccggtcaggtcatcgtcggcgaaattgaggtttatcctgagcaaaaccggccggcagtggcaaaaatcatcgaagttttgggcgattatgccgacagcggcatggagattgaaattgccgtgcgcaagcatcatttgccgcaccaattcagtgaagcgtgtgccaaagccgcgaaaaaaattcccgaccatgtacgcaaaagcgatttgaaaggccgcgtcgatttgcgcgatttgcctttggtaacgatagacggcgaaacggcgcgcgattttgacgatgccgtgtttgccgaaaaaatcggacgcaattaccgtctggtcgtggcgattgccgatgtcagccattatgtccgccccgatgacgctatcgacacggacgctcaggaacgcagcaccagtgtttacttcccgcgccgcgtgattcccatgttgccggaaaacctgtccaacggcatctgctcgctcaatcctaatgtcgagcgtttgtgtatggtgtgcgatatggtcatcacttacgcgggcaatattaaagaataccgcttctaccccgccgtgatgcgctctcatgcccgcctgacctacaaccaagtttggaaatggctttcagacggcatcgggcatccgttcaaagcacaaatcgacacgctttacaaactcttcaaaatccttcagaaaaagcgtttcgaacgcggggcggtggagtttgacagcatcgaaacccaaatgcttttcgacgacaacggtaaaattgaaaaaatcgtccccgttgtccgcaacgatgcccacaagctgattgaagaatgtatgttggcggcaaacgtttgcgcagcggattttctgttgaaaaacaagcataccgcattgttccgcaaccatttggggcccacgcccgaaaaactcgccgccttgcgcgagcagctcggtctgttggggcttcaacttggcggcggcgacaacccgtcgccgaaagactatgccgcgcttgccggacagttcaaaggcaggccggatgccgaattgctgcaagtcatgatgttgcgctccatgcaacaggcggtttacgaaccgcattgcgacggacactttggtcttgcctacgaagcatacgcccacttcacctcgcccatccgccgctatcccgacctgaccgtacaccgcgccatcaaagccgtgttgaatcagcaaacctacacgccaaaaaaaagctggcaggctttgggcgtgcatacctcgttctgtgagcgccgtgccgacgacgccagccgcgacgtggaaaactggctgaaaacctattatatgcgcgataaggtcggcgaagtattcgaaggtaaaatctccggcatgaccagttttggtatctttgtaacactggacggcatccacattgacggcttggtgcatatcagcgatttgggcgaagactatttcaacttccgccccgaaatcatggcaatcgaaggcgaacgcagcggcatccgtttcaacatgggggacagggttgccgtccgggtcgcccgtgccgatttggatgatggaaaaatcgattttgtcctgattgccgaggggagcggcagggggcggaaagttaaatcatccgcgtctgccaaaccggcagggacggcggggaaagggaaaccgaaaaccgccgccgagaaaaaaacagcccgaggcggcaaagtaaggggaaggggcgtgtctgccgccgcagaatcggggaaaaaggcaaagaaaccggttccgattaaggtaaaaaaacggaaaggcaaatcataa

SEQ ID NO: 70551 - DNA, 828 bp, Neisseria meningitidis
atgaaactcgatatttatgctttgctggaacgcgccctgctttcgggcgacccagatgaaaaaggacggctgacggatgaggcgtttgccgccgttcaaaatgcggacggggcggaagcaaacgcgccgccggcggacttcccccgagcgggacggccggacaagcctgttttggtcgcgccgtcgcaactgaccccgcgcaaaatgaacacaaccgaaggttatgcggcgatgctgcacgcgattgcgcatatcgaattcaacgccgtcaatctagctttggacgcggcataccgtttccgcacgctgccgtttcagtttgtccgcgactgggtgaaagtggcgaaggaagaggtgtaccatttccgcctgatgcgcgacagattgcgcgctttcggcttcgattacggcagtttcgaggcgcacaaccatttgtgggatatggcgtacaaaaccgcctacgacccgctgttgcgtatggcgttggtaccgcgcgtgttggaagcgcgcgggctggacgttacgccggggatacgcgcgaaggtggcgcagcgcggcgattcggaaacctgcggcgtattggacatcatttaccgcgacgaagtgggccatgtcgccatcggcaaccattggtatcaacacctctgccgcgaacgcggtttggaaccgattaccctgttccgcagtctgattgcccgttacgatatgtttatcttccgcggctatgtgaacatcgaagcgcgcgaaaaagcgggcttcagccgctttgaattggatatgctggaagatttcgagcagggtttgaaacagaacaaaaataccgtctga

SEQ ID NO: 70552 - DNA, 894 bp, Neisseria meningitidis
atggtaacgttttcaaaaatcagaccgcttttggcaatcgccgccgccgcgttgcttgccgcctgcggcacggcgggaaataatgctgcccgcaagccggtgcaaaccgccaaacccgccgcagtggtcggtttggcactcggtggcggcgcatctaaaggatttgcccatgtaggtattgttaaggttttgaaagaaaacggtattcctgtgaaggtggttaccggcacatcggcaggttcgattgtcggcagcctttttgcatcgggtatgtcgcccgaccgcctcgaattggaagccgaaattttaggcaaaaccgatttagtcgatttaaccttgtccaccagtggttttatcaaaggcgaaaagctgcaaaattacatcaaccgaaaagtcggcggcaggcagattcagcagtttcccatcaaatttgccgctgttgctactgattttgaaaccggcaaggccgtcgctttcaatcaagggaatgccgggcaggctgtgcgcgcttccgccgccattcccaatgtgttccaacccgttatcatcggcaggcatacatatgttgacggcggtctgtcgcagcccgtgcccgtcagtgccgcccggcggcagggggcgaatttcgtgattgccgtcgatatttccgcccgtccgggcaaaaacatcagccaaggcttcttctcttatctcgatcagacgctgaacgtaatgagcgtttccgcgttgcaaaatgagttggggcaggcggatgtggttatcaaaccgcaggttttggatttgggtgcagtcggcggtttcgatcagaaaaaacgtgccatccagttgggtgaggaggcagcacgtgccgcattgcctgaaatcaaacgcaaactggcggcataccgttattga

SEQ ID NO: 70553 - DNA, 1575 bp, Neisseria meningitidis
atggctcaaatccaaatgagcgcaaatgttaaaaccatcaacgccgtctttgccgccatgctggtaggtacagtcggctattttatttattggggcttgggttatacccattacaattacgccgccttattcattattgccacgatgttcggcgtgtttatggcgttcaacatcggcggcaacgatgttgccaattctttcggcaccagtgtcggtgcgggtacgctgaccatcccgcaggctttgctgattgcggcggtatttgaggtcagcggcgcggtcatcgcgggcggcgaggtaaccaataccatacgcaaaggcatcgtcgatttgaagggtgttgatttcgaacccatacagtttgtgtttattatgatgtccgcgcttttggcggcggcgttgtggctgttgtttgcctcgaaaaaagggcttccggtatctaccacccattccattatcggcggcattgtcggcagcgcggtatgtatggcggtaatgaacgatgccgcatcgggcgatttgatacgttggggcaagctgggcggtattggtgtttcttgggtattgtcgcccgtgttgggcggcgcggtgtcctattttctgttttcgcgcgtcaagaaaaacgtcttagattacaacgcttgggcggaaggcacgctcaagggcatcaagcaggaaaaaaaggcctataaagaacggcaccgcctgtttttcgagggtttgtccgaagccgaaaaagtcgagtacgccaccaaaatggcgcacgacgcgcaaatttacgacgaacccgaattcgatccgcaagagctgcaatcggagtattaccgcggtctttatgcgttcgacaaccgtaaaaacaatgtcgattcctacaaagcgctgcattcttggattccctttatcgcttcgttcggcgcgatgatgatttccgctatgctgattttcaagggcttgaaaaacctgcatttggggatgagcaacgtcaacagcttcctgaccatctttatgataggcgcggcggtgtggatggggacgtttgtgtttgccaaaagcctcaagcgtaaagacttgggcaaatcgacctttcagatgttttcatggatgcaggtctttaccgcctgcggcttcgcattcagccacggtgcgaacgatatcgccaacgccatcggtccgtttgccgcgattatggatgttttgcgtaccaacagcgttgccgcgcaaaatgtcgtccccccgattgcgatgctgactttcggtatcgcgctgattgtcggtttgtggtttgtcggtaaagaggtgattaaaaccgtcggtacgagtttggcggaaatgcatcctgcttcgggttttaccgccgaactgtccgccgcctccgtcgtgatgggcgcgtcgctgatggggctgcccgtgtccagtacgcatatcttggtcggcgcggtactcggcatcggtctggtcaaccgcaatgccaactggaaactgatgaagcccatcggtttggcgtgggtcattaccctgcctgccgccgccgtattgtcggttgtctgctacttggttttacaggcagtattctga

SEQ ID NO: 70554 - DNA, 720 bp, Neisseria meningitidis
ttgactttaacccgaaaaacccttttccttctcaccgccgcattcggcacacactcccttcagacggcatccgccgacgcagtggtcaaggcagaaaaactgcacgcctccgccaaccgcagctacaaagtcgccggaaaacgctacacgccgaaaaaccaagtcgccgaattcacgcaaaccggcaacgcctcgtggtacggcggcaggtttcacgggcgcaaaacttccggcggagaacgatacgatatgaacgcctttaccgccgcccacaaaaccctgcccatccccagctatgtgcgcgtaaccaataccaaaaacggcaaaagcgtcatcgtccgcgtcaacgaccgcggccccttccacggcaaccgcatcatcgacgtatccaaagccgccgcgcaaaaattgggctttgtcaaccaagggacggcgcacgtcaaaatcgaacaaatcgtcccgggccaatccgcaccggttgccgaaaacaaagacatcttcatcgacttgaaatctttcggtacggaacacgaagcacaagcctatctgaaccaagccgcccaaaacttcgccgcttcggcatcaagcccgaacctcgccattgaaaaacgccgttacgaatacgtcgtcaaaatgggaccgtttgcctcgcaggaacgcgccgccgaagccgaagctcaggcgcgcggtatggttcgggcggtattgactgccggttga

SEQ ID NO: 70555 - DNA, 687 bp, Neisseria meningitidis
atgtacgcatttaccgacgcacagcaacagaaggcactcttccggctggtgctttttcatatcctcatcatcgccgccagcaactatctggtgcagttccccttccaaattttcggcatccacaccacttggggcgcgttttcctttcccttcatcttccttgccaccgacctgaccgtccgcattttcggttcgcacttggcacggcggattatcttttgggtgatgttccccgcccttttgctttcctacatcttttccgttttgttccacaacggcagttggacaggcttgggcgcgctgtccgaattcaacacctttgtcggacgcatcgccttagccagctttgccgcctatgcgctcggacaaatccttgatatttttgtattcaacaaattacgccgtctgaaagcgtggtggattgccccaaccgcatcaaccgtcatcggcaacgccttggatacgttggtatttttcgccgttgccttctatgcaagcagcgatgaatttatggcggcaaactggcagggcatcgcttttgtcgattacctgttcaaactcaccgtctgcggtctgtttttcctgcccgcctacggcgtgattctgaatctgctgacgaaaaaactgacgaccctgcaaaccaaacaggcgcaagaccgccccgcgccctcgctgcaaaatccataa

SEQ ID NO: 70556 - DNA, 1356 bp, Neisseria meningitidis; identical to SEQ ID NO: 62577

SEQ ID NO: 70557 - DNA, 393 bp, Neisseria meningitidis; identical to SEQ ID NO: 54872

SEQ ID NO: 70558 - DNA, 561 bp, Neisseria meningitidis; identical to SEQ ID NO: 55625

SEQ ID NO: 70559 - DNA, 738 bp, Neisseria meningitidis
atgattattttggacaaggtttccaagcattaccaaacgcgcgacaagacccgttttgccgccgtcgagccgaccagcctcgaaatccgcgacggcgaaatcttcgggctgatgggttattcgggtgcaggcaaatccaccctgttgcgcctgattaacctgttggaacgccccgacagcggcaaggtcaacgtctgcggacaagagctaaccgcgctcgatgccgccgcattgcgtcaggctcggcagaatatcggcatggtgtttcagcagttcaacctgttgaacaaccgcaccgtcgccggcaacgtcgccttcccattggaaatcgccggatggccgtctgaaaaaatcaaagcgcgcgttgccgaatgtctcgaaatcgtcggactgaccgaacgcgccggccactatcccgcccagctttccggcgggcagaaacaacgtgtcggcatcgcccgcgcgctcgcatccaagccgcaagtcatcctcgccgacgaacccacttccgccctcgaccccgccaccacgcgcagcgtcttggaatgtttggaagacatcaacaaacgcttcaacgtaaccatcgtcatcgtaacccacgaaatgagcgtcatcagacgactgtgcgaccgcgccgccctgttggataagggaaaagtcgtcgaaatcgtcgaagtacgcggcaaccaaatccacgcccgatccgacatcgggcgcgaactcatcagagaggactga

SEQ ID NO: 70560 - DNA, 120 bp, Neisseria meningitidis
  misc_feature 97, 98, 99, 100, 101: 'n' is a, c, g or t
gtgaccggcaaacgcccgatgtccggcaacaacgtatcgcacgccaacaacaaaaccaaacgccgttttttgcccaacttgcaatcacgtcgttttnnnnncacacacttaattaattaa

SEQ ID NO: 70561 - DNA, 924 bp, Neisseria meningitidis
atgcaatacagcacactggcaggacaaaccgacaactccctcgtttccaataatttcgggtttttgcgcctgccgcttaattttatgccgtatgaaagccaagcagattgggtcattaccggcgtgccttatgatatggcggtttcagggcgttccggcgcgcgtttcggttctgaagccatccggcgcgcctccgtcaacctcgcttgggagcaccgcaggtttccgtggacatttgacgtacgcgaacgcctgaacattattgactgcggcgatttggttttttcttttggcgacagcagggattttgtcgaaaaaatggaagcgcacgccggcaaattactctcttccggcaaacgctgtttgagcttgggcggcgaccatttcatcaccctcccgttgttgcgcgcccacgcccgctatttcggcaaactcgcactgattcattttgacgcgcacaccgacacctacgaaaacggcagcgaatacgaccacggcacgatgttttataccgcccccaaggaaggcatcatcgatccggcacattccgtgcaaatcggcatacgtaccgaacacagtaaaaaattgccttttactgtgttgaccgccccccaagtcaatgaagacagtgttgaagagaccgtccgtaaaatcaaagaaaccgtcggcaatatgcccgtttacctgactttcgacatagactgcctcgacccgtcgttcgcccccgggaccggtacgcccgtatgcggcggcttgagcagcgacagggcattaaaaatcctacgtgggctgacggatctcgacatcgtcggtatggatgttgtagaagttgccccctcttacgaccaatccgacattaccgctttggccggcgccacaattgccttggaaatgctttaccttcaaggtgcgaaaaaggactga

SEQ ID NO: 70562 - DNA, 2703 bp, Neisseria meningitidis
atgcaactgcatatcttgaataatccgaaggatgcggctttggcggcggatgcggaatttctgaaacaatccctgttcaacctcctgcacgaagaagcctcgccgttggttgtcgaaacggtcaaactcttgtccacttccgacgacagcgcggcattgattgaaaaagtattgccgcaattggacgaacggcagacctacgatctgacgcttgcctgcgggctgttcgcccagattctgaatatcgccgaagacgtgcaccacgaacgccgccgccaaatccacgaagatgccggccacaacgcagcagaaggcagcctgacggaaaccgtccgcaggctcaaagcggggaaagccgacggcaaatcggtacagcagcagttggacaatacgtccgttaccgccgttttgaccgcgcacccgaccgaagtgcaacgccaaaccgttttgaatttcaaccgccgcatccgcgcgctgctgccgcaacgcgaacgctgcaccaatgccgacgcgctggcacggctgcgccgcgaaatcgacaccgtgcttttgggcttgtggcagaccagcgaaacgcgccgccacaaactcagcgtcaacgacgaaatcaacaacggcgtgtccatcttcccgatgagcttttttgaagccctgcccaaactctaccgcaagatggaacacgactttcagacggcctatcccgatgtccgcgttccgaacatcctcaaaatcggcggctggatcggtggcgaccgcgacggcaatccgttcgtttctgccgaaaccctgcgctttgcgttcagacggcatgccgatgccgtgttccgtttttaccgcagcgaactcgacaaactttaccgcgaactgccgctctccatccgccgcgtcaaagtcaacggcgatgtgacggcgttgtccgacaaatcgcccgacgaagaaatcgcccgcgccgaagaaccctaccgccgcgccatcgcctacattatggcgcgcgctatgggcaaagcgcgcgcgctcggtttgggtatgggctgcaaattcggctttctcgagccttatgcttcggcacaagaatttctcgatgatttgaaaaaattgcaacgttcccttatcgacaacggcagccgcctgcttgccgaaggccgtcttgccgacattatccgcagcgtatccgtgttcggcttccacatgatgccgctcgacctgcgccaacacgcaggcaaacacgccgatgtggttgccgagcttttccaacacgcaggcttggaagactacaacagcctgaacgaagagcaaaaacaagccgccctgttgcgcgaattgagccatcaacgtccgctgtacagcccgttcatcacatacagcgaccatacccgccacgaactggcaattttcaacgaagcgcgcaaaatcaaagacgaattcggcgaagatgccgttacacaaagcattatttccaactgcgaacaacccagcgacctgctcgccttggcattgctgctgaaagaaagcggcctgctggcggtggaaaacggcaaaccgcgcagccgcatcaatatcgtgccgctgtttgaaaccatcgaagcactcgaaaacgcctgtccggtcatggaaaccatgttccgcctcgattggtacgatgccctgctcgaaagctgcggcaacatccaagaaattatgctcggctactccgactccaacaaagacggcggctatgttaccagctcatggtgtctgtatcaggcggaattgggcttggtcgaactcttcaaaaaatacgatgtccgcatgcgcctgttccacggtcgcggcggcagcgtcggacgcggcggcggcccttcttaccaagccattctcgcccaaccggcgggcagcgtggcgggacaaatccgcattaccgaacaaggcgaagtcattaccgccaaatacgccgaccccggcaatgcccaacgcaacttggaaaccttggttgccgcgactttggaagccagcatcctgccggataaaaaagaccctgatgccaaactgatgcaggcattgtcggacgtatcgttcaaatactaccgcgaactgattacccaccccgacttcatcgactacttcctgcaaaccagcccgattcaggaaatcgccaccctcaacctcggcagccgtcctgccagccgcaaaaccttggcgcggattcaggacttgcgcgctattccgtgggtattctcatggatgcaaaaccgcctcatgctgcctgcttggtacggtttcggcagcgcggtggaaaccttgtgcgaagacaaacccgaaacgctcgccgccctgcgcgaacacgcccaaagcaacccgttcttccaagccatgctttccaatatggagcaagtgatggcgaaaaccgacatcaccctcgcggaaaactatgccggcttgagcgaatcgccggaaaaagccgccgtcatcttcggcatgattaaggaagaataccaacgcagccgcaaagccctgctcgacctgctgcaaaccgaagaacttttacgcgacaaccgcagcctcgcccgttcgcttgccttgaggattccatatttgaacgcgctcaacggcctgcaggtcgccatgctcaaacgcctgcgtaaagaacccgacaatccgcacgcgctgctgatggttcacctgaccatcaacggcgtggcgcaaggtttgcgcaatacaggctga

SEQ ID NO: 70563 - DNA, 354 bp, Neisseria meningitidis; identical to SEQ ID NO: 39616

SEQ ID NO: 70564 - DNA, 1296 bp, Neisseria meningitidis; identical to SEQ ID NO: 55117

SEQ ID NO: 70565 - DNA, 141 bp, Neisseria meningitidis
gtgcattattctgcattttcgttgcctgatgtattgatgctatttgtgctgttcttatatatgttgatgctggttacgtcgcgttttttcggaaaattcaaccggcagggagccgatacgctgtttcatctctttgcttag

SEQ ID NO: 70566 - DNA, 156 bp, Neisseria meningitidis; identical to SEQ ID NO: 43525

SEQ ID NO: 70567 - DNA, 1662 bp, Neisseria meningitidis; identical to SEQ ID NO: 54520

SEQ ID NO: 70568 - DNA, 1059 bp, Neisseria meningitidis; identical to SEQ ID NO: 56028

SEQ ID NO: 70569 - DNA, 183 bp, Neisseria meningitidis; identical to SEQ ID NO: 69147

SEQ ID NO: 70570 - DNA, 1035 bp, Neisseria meningitidis; identical to SEQ ID NO: 61648

SEQ ID NO: 70571 - DNA, 1035 bp, Neisseria meningitidis; identical to SEQ ID NO: 38477

SEQ ID NO: 70572 - DNA, 1185 bp, Neisseria meningitidis
atggctaaggaaaaattcgaacgtagcaaaccgcacgtaaacgttggcaccatcggtcacgttgaccatggtaaaaccaccctgactgccgctttgactactattttggctaaaaaattcggcggtgctgcaaaagcttacgaccaaatcgacaacgcacccgaagaaaaagcacgcggtattaccattaacacctcgcacgtggaatacgaaaccgaaacccgccactacgcacacgtagactgcccggggcacgccgactacgttaaaaacatgattaccggcgccgcacaaatggacggtgcaatcctggtatgttccgcagccgacggtcctatgccgcaaacccgcgaacacatcctgctggcccgccaagtaggcgtaccttacatcatcgtgttcatgaacaaatgcgacatggtcgacgatgccgagctgttggaactggttgaaatggaaatccgcgacctgctgtccagctacgacttccccggcgacgactgcccgattgtacaaggttctgcactgaaagccttggaaggcgatgccgcttacgaagagaaaatcttcgaattggctgctgcattggacagctacatcccgactcccgagcgtgccgtggacaaacctttcttgttgcctatcgaagacgtattctctatttctggtcgtggtacagtagtaaccggtcgtgtagagcgcggtatcatccacgtcggtgacgagatcgaaatcgtcggtctgaaagaaactcaaaaaaccacttgtaccggtgttgaaatgttccgcaaactgctggacgaaggtcaagcaggcgacaacgtaggcgtattgctgcgcggtaccaaacgtgaagacgtagagcgtggtcaagtattggctaaaccgggtacaatcactcctcacaccaagttcaaagcagaagtatacgtactgagcaaagaagagggcggccgccataccccgttcttcgccaactaccgtccccaattctacttccgtaccaccgacgtaaccggcgcggttactttggaagaaggtgtggaaatggtaatgccgggcgagaacgtaaccattaccgtagaactgattgcgcctatcgctatggaagaaggcctgcgctttgcgattcgcgaaggcggccgtaccgtgggtgccggcgtggtttcttctgttatcgcttaa

SEQ ID NO: 70573 - DNA, 702 bp, Neisseria meningitidis
atgttcagacggcatcggcatttgaaaaatatgcagattaaaaaaatcatgaaatggcttcccgtcgccttgtcgcttttgggtgcgttgggttatacggggtacggcagcgaggcggtgcggacggcggttgccgtactcgacgtactcggcgcggcaggggacgcgggttccgacgcgcccgcccgccgccgagcatcggcgaaatccggccaccgctacacaggcacggtgtccaaagtctatgacggcgacacccttcacgttatcgacggcgacggcgcgaaacacaaaatccggatggcgtatatcgacgcgccggagatgaaacaggcttacggcacgcgttcgcgcgacaacctgcgtgcggcggcggaaggcaggaaagtcagcgtgcgcgtgttcgacaccgaccgctaccagcgcgaagtggcgcaggtttctgtcggcaaaaccgatttgaacctgatgcaggtgcaggacggggcggcgtggcattataaaagttatgctaaagaacagcaggataaggcggattttgccgactatgccgacgctcaaattcaggcggaaagggaacgcaaaggattgtggaaagctaaaaatccgcaagcgccgtgggcgtaccgccgagcaggcaggagcggcgggggcaataaggattggatggatgccgtgggcgaatggttgggcatttggtaa

SEQ ID NO: 70574 - DNA, 966 bp, Neisseria meningitidis
gtgaaaccgcgtttttattgggcagcctgcgccgtcctgctgaccgcctgttcgcccgaacctgccgccgaaaaaactgtatccgccgcatccgcatctgccgccacactgaccgtgccgaccgcgcggggcgatgccgttgtgccgaagaatcccgaacgcgtcgccgtgtacgactgggcggcgttggatacgctgaccgaattgggcgtgaatgtgggcgcaaccaccgcgccggtgcgcgtggattatttgcagcctgcatttgacaaggcggcaacggtggggacgctgttcgagcccgattacgaagccctgcaccgctacaatcctcagcttgtcattaccggcgggccgggcgcggaagcgtatgaacagttggcgaaaaacgcgaccaccatagatctgacggtggacaacggcaatatccgcaccagcggcgaaaagcagatggagaccttggcgcggattttcggcaaggaagcgcgcgcggcggaattgaaggcgcagattgacgcgctgttcgcccaaacgcgcgaagccgccaaaggcaaaggacgcgggctggtgctgtcggttacgggcaacaaggtgtccgccttcggcacgcagtcgcggttggcaagttggatacacggcgacatcggcctaccgcctgtagacgaatctttacgcaacgaggggcacgggcagcctgtttccttcgaatacatcaaagagaaaaaccccgattggattttcatcatcgaccgtaccgccgccatcgggcaggaagggccggcggctgtcgaagtattggataacgcgctggtacgcggcacgaacgcttggaagcgcaagcaaatcatcgtcatgcctgccgcgaactacattgtcgcgggcggcgcgcggcagttgattcaggcggcggagcagttgaaggcggcgtttgaaaaggcagaacccgttgcggcggggaaagagtag

SEQ ID NO: 70575 - DNA, 693 bp, Neisseria meningitidis
atgaaacgcttcacctatactctttccgacggcttgtgcatcgaaatcgaactcaaacgcagtgccaagaaaaatctgattctgcgccccgtcaatatgcagacggtcagcatcaacgtcccacccttttttcaagaccacgcgttagcaaactggctggcggcaaacgaaacgattttgcggaacacgcttgccaaaacgcccgtgcatcctgtttcccacccaaacttacccgagtggatttggtatcggggaataaagaccaagctggatacccacagccaaagccatatccgtatcacgtcgtctgaaatcctgcttccccgaaaagaaaccgccgcacaaatcgaccacctgcgccgcctgttgaacgaacgcgcccgcgaatacctgctgccccgccttgaaaaacacgcagccgaaacaggactgacgcccaccgccacagacctgagcaacgccaaaaccttttggggcgtatgccgcccgcacaccggcatccgcctcaactggcggctgatcggcacgcccgaatacgtcgccgactatgtctgcatccacgaactctgccacctccgccaccccgaccacagtccgcgcttttggcatttggtgaacacgctgacgccgcataccgacaatgctaaaagttggctgaaggcgcacgggcgggaattgtttgtgctggggtga

SEQ ID NO: 70576 - DNA, 918 bp, Neisseria meningitidis; identical to SEQ ID NO: 54425

SEQ ID NO: 70577 - DNA, 624 bp, Neisseria meningitidis; identical to SEQ ID NO: 43144

SEQ ID NO: 70578 - DNA, 876 bp, Neisseria meningitidis; identical to SEQ ID NO: 58967

SEQ ID NO: 70579 - DNA, 294 bp, Neisseria meningitidis; identical to SEQ ID NO: 37088

SEQ ID NO: 70580 - DNA, 279 bp, Neisseria meningitidis; identical to SEQ ID NO: 37465

SEQ ID NO: 70581 - DNA, 480 bp, Neisseria meningitidis; identical to SEQ ID NO: 36216

SEQ ID NO: 70582 - DNA, 408 bp, Neisseria meningitidis; identical to SEQ ID NO: 55051

SEQ ID NO: 70583 - DNA, 1209 bp, Neisseria meningitidis
ttgttcgcaaagaaagaaaaacgctttatctttgaaggcaggcattccgcctccgacaaactggtcaacggcgaagtatccgcgtttaccgaagaagaggcgcgcaaaaaactggcaaaacgcggcatccgcccgttgcagattacccgtgtgaaaacaagctccaagcgcaaaatcacacaagaagacatcaccgttttcacccgccagctgtccacgatgattaaagcgggcctgccgctgatgcaggcatttgaaatcgtggcgcgcggacacggcaacccgtctatgacggaaatgctgatggaaatccgaggcgaagtggaacagggcagctcgttgagccgcgcattctcaaaccacccgaaatatttcgaccgcttctactgcaacctggttgcggcaggcgaaacgggcggcgtattggaaagcctgctggacaaattggcaatttacaaagaaaaaacccaggctatccgcaaaaaggtaaaaaccgcactgacctatccggtatccgtcatcgccgtcgccatcggtttggtattcgtgatgatgattttcgtactgcccgcctttaaagaagtttacgccaatatgggcgcggagcttcccgcactgacccaaacagtgatggatatgtccgactttttcgtctcatacggctggatggtgctgatcgcactgggctttgccatatacggcttccttaaattgaaggcgcgttcgattaaaatccaacggcgtatggatgccatactgctgcgtatgccgattttcggagacattgtccgcaaagggacgattgcccgctggggcaggacgacggcgacgctgattgcggcaggcgtgcctttggtcgatgtattggactccactgccggcgcggcgggcaatttaatctatgaagaagccacccgggaaatccgtacgcgcgtcatccaaggtttgtctatgacttcggggatgcgtgcgacggaactgttccccaatatgatgttgcagatgtcttccatcggcgaggaatcgggttctttggacgatatgctcaacaaagccgccgaattttacgaagacgaggtggacaatgcggtcggcaggctgtccgctatgatggagccgatcattatcgtgattttaggcttggtcatcggcacgcttctggtcgccatgtatctgccgctgtttaatttgggcaacgtggtcgcctga

SEQ ID NO: 70584 - DNA, 945 bp, Neisseria meningitidis
atgtctgcatctaagaaatttccgattcctttgagctatttcagcatcgcgctgggcttgtttgccttggggctgtcgtggcgttacggcgcgtctgtcgggctgctgcccgccttggccgccgaatcgctgcttgcggcggcttcggtcgtctggctcttgctggtggcggcatacctgatcaaaatgtttgcgtaccgaaacgattttttgtctgatttgcgcgacttggtgcaatgctgcttcatcagcgcgattccgattaccgctatgctggagggactcgcgctgaagccctatcaggcaggcgcggcggcagtcctgatttatgccggcgttgccggacagttggcgttttcgatgtatcgggcggccggtctgtggcgcggcctgcattccttggaggcgacgacgccgattatttatctgcctacggttgcgacaaactttgtcagcgcgtcatctctggccgcgttggggcatcatgattatgcagctttgtttttcggcgcgggtatgttttcctggctgagcttggaagcctccatcttgggcaggctgcgcacggcggcaccggtcggcacggcggcgcgcggcgtggtcggcatccagcttgcgcccgcctttgtcggctgcggcgcgtattttgccgtcggcggtaaagtcgacggttttgcgttggcattaatcggctacggctgcctgcagcttttgttcttgctgcgcctgacccgctggttttgggaaggcggttttacgatgagcttttggggattttcattcggtttcgcggcaatggcaggatgcggtctgcatctggcggcttctggcatattgtcgggcttggggctgacgcttgccaccgccggatcggcaggcgtggcgctgctgcttgtcggtacgctgcaccggatagcgacggggcgtttcttggtacgcggctga

SEQ ID NO: 70585 - DNA, 183 bp, Neisseria meningitidis; identical to SEQ ID NO: 38466

SEQ ID NO: 70586 - DNA, 4194 bp, Neisseria meningitidis
  misc_feature 4171, 4172, 4173, 4174, 4175: 'n' is a, c, g or t
atgaataaaggtttacatcgcattatctttagtaaaaagcacagcaccatggttgcagtagccgaaactgccaacagccagggcaaaggtaaacaggcaggcagttcggtttctgtttcactgaaaacttcaggcgacctttgcggcaaactcaaaaccacccttaaaaccttggtctgctctttggtttccctgagtatggtattgcctgcccatgcccaaattaccaccgacaaatcagcacctaaaaaccagcaggtcgttatccttaaaaccaacactggtgcccccttggtgaatatccaaactccgaatggacgcggattgagccacaaccgctatacgcagtttgatgttgacaacaaaggggcagtgttaaacaacgaccgtaacaataatccgtttctggtcaaaggcagtgcgcaattgattttgaacgaggtacgcggtacggctagcaaactcaacggcatcgttaccgtaggcggtcaaaaggccgacgtgattattgccaaccccaacggcattaccgttaatggcggcggctttaaaaatgtcggtcggggcatcttaactatcggtgcgccccaaatcggcaaagacggtgcactgacaggatttgatgtgcgtcaaggcacattgaccgtaggagcagcaggttggaatgataaaggcggagccgactacaccggggtacttgctcgtgcagttgctttgcaggggaaattacagggtaaaaacctggcggtttctaccggtcctcagaaagtagattacgccagcggcgaaatcagtgcaggtacggcagcgggtacgaaaccgactattgcccttgatactgccgcactgggcggtatgtacgccgacagcatcacactgattgccaatgaaaaaggcgtaggcgtcaaaaatgccggcacactcgaagcggccaagcaattgattgtgacttcgtcaggccgcattgaaaacagcggccgcatcgccaccactgccgacggcaccgaagcttcaccgacttatctctccatcgaaaccaccgaaaaaggagcggcaggcacatttatctccaatggtggtcggatcgagagcaaaggcttattggttattgagacgggagaagatatcagcttgcgtaacggagccgtggtgcagaataacggcagtcgcccagctaccacggtattaaatgctggtcataatttggtgattgagagtaaaactaatgtgaacaatgccaaaggctcggctaatctgtcggccggcggtcgtactacgatcaatgatgctactattcaagcgggcagttccgtgtacagctccaccaaaggcgatactgaattgggtgaaaatacccgtattattgctgaaaacgtaaccgtattatctaacggtagtattggcagtgctgctgtaattgaggctaaagacactgcacacattgaatcgggcaaaccgctttctttagaaacctcgaccgttgcctccaacatccgtttgaacaacggtaacattaaaggcggaaagcagcttgctttactggcagacgataacattactgccaaaactaccaatctgaatactcccggcaatctgtatgttcatacaggtaaagatctgaatttgaatgttgataaagatttgtctgccgccagcatccatttgaaatcggataacgctgcccatattaccggcaccagtaaaaccctcactgcctcaaaagacatgggtgtggaggcaggcttgctgaatgttaccaataccaatctgcgtaccaactcgggtaatctgcacattcaggcagccaaaggcaatattcagcttcgcaataccaagctgaacgcagccaaggctctcgaaaccaccgcattgcagggcaatatcgtttcagacggccttcatgctgtttctgcagacggtcatgtatccttattggccaacggtaatgccgactttaccggtcacaataccctgacagccaaggccgatgtcaatgcaggatcggttggtaaaggccgtctgaaagcagacaataccaatatcacttcatcttcaggagatattacgttggttgccggcaacggtattcagcttggtgacggaaaacaacgcaattcaatcaacggaaaacacatcagcatcaaaaacaacggtggtaatgccgacttaaaaaaccttaacgtccatgccaaaagcggggcattgaacattcattccgaccgggcattgagcatagaaaataccaagctggagtctacccataatacgcatcttaatgcacaacacgagcgggtaacgctcaaccaagtagatgcctacgcacaccgtcatctaagcattaccggcagccagatttggcaaaacgacaaactgccttctgccaacaagctggtggctaacggtgtattggcactcaatgcgcgctattcccaaattgccgacaacaccacgctgagagcgggtgcaatcaaccttactgccggtaccgccctagtcaagcgcggcaacatcaattggagtaccgtttcgaccaagactttggaagataatgccgaattaaaaccattggccggacggctgaatattgaagcaggtagcggcacattaaccatcgaacctgccaaccgcatcagtgcgcataccgacctgagcatcaaaacaggcggaaaattgctgttgtctgcaaaaggaggaaatgcaggtgcgcctagtgctcaagtttcctcattggaagcaaaaggcaatatccgtctggttacaggagaaacagatttaagaggttctaaaattacagccggtaaaaacttggttgtcgccaccaccaaaggcaagttgaatatcgaagccgtaaacaactcattcagcaattattttcctacacaaaaagcggctgaactcaaccaaaaatccaaagaattggaacagcagattgcgcagttgaaaaaaagctcgcctaaaagcaagctgattccaaccctgcaagaagaacgcgaccgtctcgctttctatattcaagccatcaacaaggaagttaaaggtaaaaaacccaaaggcaaagaatatctgcaagccaagctttctgcacaaaatattgacttgatttccgcacaaggcatcgaaatcagcggttccgatattaccgcttccaaaaaactgaaccttcacgccgcaggcgtattgccaaaggcagcagattcagaggcggctgctattctgattgacggcataaccgaccaatatgaaattggcaagcccacctacaagagtcactacgacaaagctgctctgaacaagccttcacgtttgaccggacgtacgggggtaagtattcatgcagctgcggcactcgatgatgcacgtattattatcggtgcatccgaaatcaaagctccctcaggcagcatagacatcaaagcccatagtgatattgtactggaggctggacaaaacgatgcctataccttcttaaaaaccaaaggtaaaagcggcaaaatcatcagaaaaaccaagtttaccagcacccgcgaccacctgattatgccagcccccgtcgagctgaccgccaacggtatcacgcttcaggcaggcggcaacatcgaagctaataccacccgcttcaatgcccctgcaggtaaagttaccctggttgcgggtgaagagctgcaactgctggcagaagaaggcatccacaagcacgagttggatgtccaaaaaagccgccgctttatcggcatcaaggtaggtaagagcaattacagtaaaaacgaactgaacgaaaccaaattgcctgtccgcgtcgtcgcccaaactgcagccacccgttcaggctgggataccgtgctcgaaggtaccgaattcaaaaccacgctggccggtgccgacattcaggcaggtgtaggcgaaaaagcccgtgtcgatgcgaaaattatcctcaaaggcattgtgaaccgtatccagtcggaagaaaaattagaaaccaactcaaccgtatggcagaaacaggccggacgcggcagcactatcgaaacgctaaaactgcccagcttcgaaagccctactccgcccaaattgtccgcacccggcggctatatcgtcgacattccgaaaggcaatctgaaaaccgaaatcgaaaagctgtccaaacagcccgaatatgcctacctgaaacagnnnnncacacacttaattaattaa

SEQ ID NO: 70587 - DNA, 180 bp, Neisseria meningitidis; identical to SEQ ID NO: 42055

SEQ ID NO: 70588 - DNA, 594 bp, Neisseria meningitidis
atgcgcaaacagaacgctttgacgggaatcccgacttctgacggacagagggggttcgcgctgtttatcgtgctgatggtaatgatcgtcgtggcttttttggttgtaactgccgcgcagtcttacaataccgagcagcggatcagtgccaacgaatcagacaggaaattggctttgtctttagccgaggcggctttgcgggaaggcgaacttcaggttttggatttggaatatgatacggacagtaaggttacatttagcgaaaactgtggaaaaggtctgtgtaccgcagtgaatgtgcggacaaataatgataatgaagaggcttttgacaatatcgtggtgcaaggcaagcccaccgttgaggcggtgaagcgttcttgcactgcaaattctaccaacctgtgcattgacaataaagggacggaatataagaaaggcacgcaaagcgtcagcaaaatgccacgttatattatcgaatatttgggcgtgaagaacggagaaaatgtttatcgggttactgccaaggcttggggtaagaatgccaataccgtggtcgtccttcaatcttatgtaagcaataatgatgagtaa

SEQ ID NO: 70589 - DNA, 702 bp, Neisseria meningitidis; identical to SEQ ID NO: 61787

SEQ ID NO: 70590 - DNA, 921 bp, Neisseria meningitidis
  misc_feature 4, 5, 6, 7, 8: 'n' is a, c, g or t
gtgnnnnnccgccactgcaccgtcaccgaaatcgccaaacagctgaaccgccacaaaagcaccatcagccgcgaaatcagacggcaccgcacccaagggcagcaatacagcgccgaaaaagcccagcggcaaagccggactatcaaacagcgtaagcgacaaccctataagctcgattcgcagctgattcagcacatcgacccccttatccgccgcaaactcagtcccgaacaagtatgcgcctacctgtgcaaacaccaccagatcacgctccaccacagcaccatttaccgctaccttcgccaagacaaaagcaacggcagcacgttgtggcaacatctcagaatatgcagcaaaccctaccgcaaacgctacggcagcacatggaccagaggcaaagtacccaaccgtgtcggcatagaaaaccgacccgctatcgtcaaccagaaatcccgtatcggcgattgggaagccgacaccattgtcggcaaaggacagaaaagcgcattattgaccttggtcgaacgcgttacccgctacaccatcatctgcaaattggatagcctcaaagccgaagacactgcccgggcagctgttagggcattaaaggcacataaagacagggtgcacaccattaccatggataacggcaaagagttctaccaacacaccaaaataaccaaagcattgaaagcggagacttatttttgtcgcccttaccattcttgggagaaagggctgaatgagaacaccaacggactcatccggcaatacttccccaaacaaaccgatttccgtaacatcagtgatcgggagatacgcagggttcaagatgagttgaaccaccgaccaagaaaaacacttggctacgaaacgccaagtgttttattcttgaatctgttccaaccactaatacactag

SEQ ID NO: 70591 - DNA, 1116 bp, Neisseria meningitidis; identical to SEQ ID NO: 63878

SEQ ID NO: 70592 - DNA, 1020 bp, Neisseria meningitidis; identical to SEQ ID NO: 61746

SEQ ID NO: 70593 - DNA, 1344 bp, Neisseria meningitidis
atgaaccaaaaccatactattttacaaaacctccccgtcggtcagaaagtcggcatcgccttctccggcggacttgatacctccgccgcgctgttgtggatgaaactcaaaggcgcactgccttatgcctacactgccaacctcggtcagcccgatgaagacgactacaacgccattcccaaaaaagcgatggaatacggtgcggaaaacgcccgcttaatcgactgccgcgcgcagttggcacacgaaggcatcgccgccatccaatgcggcgcgttccacgtttccaccggcggcatcgcctatttcaacaccacgcctctgggtcgcgccgtaaccggcacgatgcttgtttccgcaatgaaagaagacgacgtaaacatctggggcgacggcagcacctacaaaggcaacgacatcgagcgtttctaccgctacggtttgctcaccaatcccgcgctgaaaatctacaaaccctggctcgaccagcaatttatcgacgaactcggcggccgtcacgaaatgagcgaatttctgattgccaacggcttcaactacaaaatgtcggttgaaaaagcctactccaccgattccaatatgctcggcgcgacccacgaagccaaagacttggaatttttgaactcgggcatcaaaatcgtcaaacccattatgggcgttgccttttgggacgaaaacgtcgaaatcgaacccgaagaagtcagcgtgcgctttgaagaaggcgtgcccgtcgcattaaacggcaaagaatacgccgaccccgtcgaactcttcctcgaagccaaccgcatcggcggccgccacggcttaggcatgagcgaccaaatcgaaaaccgcatcatcgaagccaaatcgcgcggcatctacgaagccccgggaatggcgttgttccacatcgcctacgaacgcttggtgaccggcatccacaacgaagacaccatcgaacaataccgcatcaacggcctgcgcctcggccgtttgctctaccaaggccgctggtttgacagccaagccctgatgttgcgcgaaaccgcccaacgctgggttgccaaagccgttaccggcgaagttaccctcgaactgcggcgcggcaacgactactcaattctgaacaccgaatcgcccaacctgacctaccaacctgaacgcctgagtatggaaaaagtcgaagacgctgcgttcactccgctcgaccgcatcggacagctcacgatgcgcaacctcgacatcaccgacacccgcgtcaaactgggtatctactcgcaaagcggtttgctctcgctgggcgaaggttcggtattgccgcagttgggcaataagcaataa

SEQ ID NO: 70594 - DNA, 822 bp, Neisseria meningitidis; identical to SEQ ID NO: 54440

SEQ ID NO: 70595 - DNA, 597 bp, Neisseria meningitidis; identical to SEQ ID NO: 38176

SEQ ID NO: 70596 - DNA, 426 bp, Neisseria meningitidis
atgaaaacagcccgccgccgttcccgcgagcttgccgtacaagccgtttaccaatcccttatcaaccgcaccgcagcacccgagattgctaaaaacatccgcgaaatgtccgactttgccaaagcggacgaagaattgttcaacaaacttttcttcggcacgcaaaccaatgcggcagaatacatccggcaaatccgcccgctgctcgacagggacgaaaaagacctcaaccccatcgaacgcgccgtcctgctgaccgcctgccacgagttgtccgccatgcccgaaacgccctaccccgtcatcatcaacgaagccatcgaagtcaccaaaaccttcggcggtacggacgggcacaaattcgtcaacggcatcctcgacaaactcgccgcccaaatccgccccgacgagcccaaacgccgttga

SEQ ID NO: 70597 - DNA, 609 bp, Neisseria meningitidis
  misc_feature 594, 595, 596, 597, 598: 'n' is a, c, g or t
ttggagctgccggtattggaagccagcatcgggcacgatgtggttgacattcgggggctgacaaaaaatacaggtttgttttccttcgaccccggatttgtttcaaccgcaagctgtgagtctaaaattacttacatcgacggcgatcaaggcttgctttattatcgcggataccccatcgagcagctggccgaaaaatccgattatttggaagtctgctacctgttgatttacggcgaactgccgactcccgagcaaaaggcagaatttgacaataccgtccgccgccacacgatggtgcatgaacagctgacttggttcttccgggggtttcgccgcgacgcgcatccgatggcgatgatggtcggcgtggtcggcgcgctgtctgcgttctaccaagacagcttggacattagcaatcccgaacaccgcaaaatcgcgatttaccgcctgatttccaaaatcccgaccattgcggcaatgtgctaccgctattcaaacggtctgccgttcaattatccgaagaataatctttcttattccgaaaacttccttcatatgatgttcgccacgccgtgtgaagactacaaaccnnnnncacacacttaa

SEQ ID NO: 70598 - DNA, 204 bp, Neisseria meningitidis
atgaaaaagtctttgattgctttatgtgttgcccattgtgcaaagttgaaaaacgattttggcgtaccaccgttacctgaaatcaaaatcacgccaagccctgttcgggtaggctctttgaaacaacatccgcgcctgcgcttgggtaaatcaggcgtggcggcagccaaacgcgcggcgcgcaaacgcaagaatcgtcgttaa

SEQ ID NO: 70599 - DNA, 840 bp, Neisseria meningitidis
atgctggtcgcttttttaattatgttgcgcgagggtatcgaagccgcgctcatcgtcggcatcgttgccggttttctgaaacagtccggacattccaaactgatgcctaaggtctggttcggggtcgtccttgcttctttgatgtgtttggggctggggtacggcatccattcggcaacaggcgagattccccagaagcagcaggagtttgtcgtcggcatcatcggtttggttgccgttgccatgctgacttatatgattttatggatgaaaaaggcggcgcgttcgatgaagcagcagcttcaggattctgtacaggcggctttgaaccgtggcagcggtcaaggatgggccttggttggtatggcgtttcttgccgtggcgcgcgaaggtttggagagcgtttttttcctgcttgctgtattcaaacagagcccgacgtggcagatgccggccggtgcggtagcgggggttttggctgccgccgtgattggcgcgttgatttatcagggtgggatgcgcctgaatctggcgaagtttttccgttggacgggggcgtttttgattgccgttgccgccggtctgcttgccggctcgctgcgcgcgctgcatgaggcaggtatttggaacgcgcttcaggatattgtgttcgagtcatcaaaatatttgcacgaagacagcccgttgggcgtgctgctcggcggatttttcggctataccgaccatccgacgcagggcgaggccttggtttggctgctgtatcttattcccgtcatgacttggtttttgtgcggcagcaggccgtctgaaactttaacccgtaaagaggagctgaaatga

SEQ ID NO: 70600 - DNA, 774 bp, Neisseria meningitidis; identical to SEQ ID NO: 61132

SEQ ID NO: 70601 - DNA, 2226 bp, Neisseria meningitidis
atgactcaaaaatccaccattgtttatacccataccgacgaagcccccgcgctggcgacccaatcgctgctgccgattgtgcaggcgtttgcccgccacgccgatattgatgtcaaaactgccgacatttccctgtccggccgtattttggcggcattccccgaatatctgaccgaagcgcaacgcgtacccgacgcgcttgccgaattgggcgaactggtgaaacaacccgatgcaaacgtaatcaaactgccgaacatcagcgcgtccgtaccgcaactgactgctgcgattaaagaattgcagtctaaaggctttaccatccccgactatcccgccgacccgcaaaccgatgaagaaaaagccgtgcgcgaacgctacgaccgcatcaaaggcagcgcggtaaaccctgtcctgcgcgaaggcaactccgaccgccgtgcgcctaaagcagtgaaaaactttgccaaaaaaaatccgcacagcatgggcgcatggacgaaagactccaaaacccacgttgccaccatgcaaagcggcgactttttccataacgaacaatccgttaccgtacccgatgcgacttccgtatccatcgtattcaccgacaaacaaggcaacaaaaaagagctgcgcgagcccgtcgccctgaaagccggcgaaatcatcgacgcgaccgtgatgagtaaaaaagccctgctcgccttccttgccgaacaagtaaaagatgcgaaagcaaaaggcgtgttgttctcgctgcacatgaaagccactatgatgaaagtgtccgacccgattatcttcggacacgccgtcaaagtattcttcgcgcctgtttttgaaaaattcggcgacaaactggctgccgcaggcgtcaacgttaacaacggcttcggcaacctgcttgccaatctggacaaactggatgcggacacccgcaccgccgtcgaagccgaaatcgccgccgtttacgctgccaaccccgatttggcgatggttgattccgacaaaggcatcaccaacctgcacgttcccagcgatgtcatcgtcgatgcctctatgcctgcgatgattcgcaattccggccgtatgtgggacaaaaacggcaaagcgcaagacaccaaagccgtgattcccgacagcagctatgccggcgtttaccaagcaaccatcgacttctgccgcgaacacggcgcgttcgatccgacaacaatgggtactgttcccaatgtcggtttgatggcgcaagcagcggaagaatacggttcacacaacaaaacctttgaaatcgaagccgacggtcaggttcaagtcattgatgcggaaggaaaagtcctgatgcagcacgacgttgaagcaggcgacatctggcgtatgtgccaaaccaaagacgctccggtcaaagactgggtgcaactcgccgtcaaccgcgcccgcctgagcaacacgcctgccgtgttctggctcgatgaaaaccgtccgcacgacaagagcctgctcgccaaggttaaagcctaccttgccgaactggataccaatggcctcgacatccgcatcctcgctcctgaagaagccgccaagttcagcttgggtcgtctgaaaaacggcgaagacaccatctccgtaaccggtaatgtcttgcgcgactacctgaccgacttgttcccaattttggaactcggcacaagcgcgaaaatgctgtctatcgttccattgatgaacggcggcggtatgtttgaaaccggcgcgggcggttctgcaccgaaacatgttcaacaattcctcgaagaaaaccacctgcgttgggactctttgggcgaattcctcgcactcgccgtatcgtttgaacatctggcgcaaaaaaccggcaacaccaaagcccaagtcctcgccgacactttggatgcagccaccgaaaaactgctgttgaacgacaaatcgcccaaacgtaaagccggcgaactcgacaaccgcggcagccatttctacctcaccctctactgggcgcaagaattggcggcgcaagacaaagatgccgaactgaaagccgcatttacgccattggcagccgctttgaccgccgacgaagcgaaaatcgttgccgagctttccgccgtacaaggcaaagcggccgacatcggcggctactacgccgccaatcctgaaaaagccgcacaagtgatgcgtccgagcgtaacctttaatcaggcactaaacgccttataa

SEQ ID NO: 70602 - DNA, 747 bp, Neisseria meningitidis; identical to SEQ ID NO: 51012

SEQ ID NO: 70603 - DNA, 795 bp, Neisseria meningitidis; identical to SEQ ID NO: 61661

SEQ ID NO: 70604 - DNA, 1419 bp, Neisseria meningitidis
gtgaaaccgctgcgaagactgacaaacctccttgccgcctgcgccgtagcggcggccgcactcatacagcccgccctcgcagcggacttggcgcaagacccgttcattaccgataacacccaacggcagcactacgaacccggcggcaaataccacctcttcggcgacccgcgcggcagcgtttccgaccgcaccggtcaaatcaacgtcatccaagactatacccaccagatgggcaacctgctcatccaacaggcggcaatccaaggcaatcttggttacaccgtccgcttttccggacacggatacgaagaacacgcccccttcgacaaccacgccgccgacagcgcaagcaaagaacaaggcaacgttgacgacggctttaccgtataccggctcaactgggaaggacacgaacatcatcccgccgatgcctacgacggcccgaagggcggcaattaccccaaacctacgggcgcacgcgacgaatacacctatcacgtcaacggcacagcacgcagcatcaaactcaatccgaccgacacccgcagcatccggcaacgcatatccgacaactacaacaacctcggcagcaatttctccgaccgcgccgatgaagccaacagaaaaatgttcgagcacaatgccaagctcgaccgctggggcaacagcatggagtttatcaacggcgtcgccgccggcgcgctcaacccctttatcagcgcgggcgaagccttgggcataggcgacatactgtacggaacgcgctatgccatagacaaagccgcaatgcgcaacatcgcccccttgcccgccgagggcaaattcgccgtcatcggcggcttgggcagcgtggcgggctttgaaaaaaatacgcgcgaagccgttgaccggtggatacaggaaaaccccaatgccgccgaaaccgtcgaagccgtcttcaacgttgccgcagcagccaaagtcgcgaagctggcaaaggcggcaaaaccggggaaggctgcggttagtggggatttctcagactcctacaagcataacactgcttcaagattatctcagtctgtagatggagaaatgtttcaaacccgcaatgttgattttaaagcaaaatctattgggactaaaattcatgatggagctcaagggaaacatatttcaggacatagaaactacattgaaggtaagagtactttaaatcaaaacattaatcctcaagaattgttgaacggaatacattcaggtgcttatccagttatttctaaaggagcaagaggaaatcctgttgttgattttgggtatcctataggcagcgatgggaaatcaggattaagtaccaattttggtacgattcattcaggtaaaaatggagttcacattgttccggctaaccctaaaaccattaaaaaggtgcaatag

SEQ ID NO: 70605 - DNA, 789 bp, Neisseria meningitidis; identical to SEQ ID NO: 64071

SEQ ID NO: 70606 - DNA, 678 bp, Neisseria meningitidis; identical to SEQ ID NO: 47619

SEQ ID NO: 70607 - DNA, 1143 bp, Neisseria meningitidis
atgaatactttatatacacttttcgccacctgcccgcgcggcttggaaaccgttttatcgcaagaactcgaaagcctcggctgtaccgatgtacaagcgtttgacggcggcgtttcctgccggggcggattggaacaggcctacgccgccaacctgcactcgcgtaccgccggccgtatcctgctgcgtctgaccaaagggacataccgaaccgagcgcgacatctacaaacttgccaaaaacatcaactggtttaattggtttactttacagcagacgttcaaagtcaaagtcgaggcaaagcgtgccaacgttaagagcatccaatttgtcggactgaccgtcaaagatgccgtctgcgacgctttccgcgacatttacgacgcacgtccgagcgtggacaaagccgcgcccgatgtccgcatccacgcctttttggacgaacgcaatgttgaaatcttcatcgacacttcgggcgaagccctgttcaaacgcggctaccgcctggataccggcgaagccccgctgcgcgaaaaccttgccgccggactgctgctctcggcaggctacgacggcacgcagccgtttcaagacccgttttgcggcagcggcacgattgctatcgaagccgcttggattgccgcccgccgcgcgccgggcatgatgcgccgcttcggttttgaaaaactgcaaaatttcgataaaacgctgtgggcggatttgcgccgccgtgccgaagcgcaggttaaaccggcttttgcaccgattgcaggcagcgacaacgaccgccgcatcgttcagacggcattggacaacgcacgcagtgccgaagtggacgacatcgtttccttcagcgttgccgacgcgcagtccgtccgaccgaacggcgaaaacggcattatggtgtccaatccgccctacggcgtgcgccttgaggaagtccgtgtcttgcaggcgctttatccgcagttggggacgtggttgaagaaatattacgcaggctggttggcggcaatgtttaccggagatcgggaaatgcccaaattcatgcgcctgtcgccaaaacgcaaaattccgctttataacggcaacctcgattgccgcctgttcctgattgatatggtgcagggatcgaaccgttga

SEQ ID NO: 70608 - DNA, 2028 bp, Neisseria meningitidis
atggaagtcattcgataccccgattcccccttcaaactccaccaacccttcccgcccgcaggcgaccagcctaccgctattgccgacttgctcgaagggctttcagacggccttgcctaccaaaccctgctcggcgtaaccggttcgggcaaaacctacaccatggcgaacgtcatcgcccaaagcggccgacccgccatcatcatggcgcacaacaaaacccttgccgcccagctttatgccgaaatgcgcgagtttttccctgaaaacgcggtggaatatttcgtctcctactacgactattaccaacccgaagcctatgtgccaagccgcgatttgttcatcgaaaaagacagtgcgatcaacgaacacattgaacaaatgcgcctttctgccaccaaaaacctgatgacgcgcgatgacgtgattatcgttgccactgtgtccgccatttacggtatcggcgacccgactgagtatcaacaaatggtgttgtccgtcaaagaaggcgacaccatcgagcagcgcgacatcatcgccacgctcgtttccatgcagtacgaacgcggcgatttggatttcaaacgcggcagcttccgcgtgcgcggcgacgtgattgacgtgtaccccgccgaaagctccgaaaacgccttgcgtatcagcctgtttgacgacgaaatcgaccgcctcgatatgtttgacccgctttcaggcagcctgcaccaacgcgtcggccgctacaccgtcttcccgtccagccactacgttaccccgcgcgacaccgtattgcgcgcctgcgagtccatcaaagaagaattgcgcgaacgcattgatttctttaccaaagaaaaccgtcccgtcgagcaacaacgcatcgaacagcgcacccgtttcgacctcgaaatgctctacgaaatgggcttctgcaaaggtatcgaaaactactcccgtcacttctccggcaaaaaagaaggcgaaccgccgcccacgctgatggactacctgcccgacaacgccatcatgttcatcgacgaaagccacgttaccgtcacacaaatcggcggcatgtacaaaggcgacgcatcgcgcaagcaaaacctcgtcgattacggcttccgcctaccttccgcccgcgacaaccgcccgctcaaattccacgaatttgaaaaagtcatgccgcaaaccgtcttcgtttccgccacccccgccaaatacgaagaagaacacgccggacaagtggtcgaacaagtcgtccgccccacagggctggtcgaccctcaaatcatcatccgccccgtcgccacccaagttgatgacttaatgagcgaaatcaacgaccgcatccaaaaaggcgaacgcgtactcgttaccacccttaccaaacgcatggcggagcaactcaccgactattacagcgaactcggcatcaaagtgcgctacctgcacagcgacatcgacaccgtagagcgcgttgaaattattagagatttacggctcggattgtttgacgtactcgtcggcatcaatctcttgcgcgaaggcctcgacatcccagaagtctccctcgtcgccatcctcgacgcagacaaagaaggcttcctgcgctcccaccgcagcctgattcaaaccataggccgcgctgcgcgcaacgtgaacggcgtcgcgattctgtacgccgacaaaatcaccgactctatgaaagccgccatcgacgaaaccgaacgccgccgtgaaaaacaaattaaattcaacgaagaacacggcatcgtgccgcaacagattaaaaaacaggtcaaagacatcattgacggcgtgtaccacgaagaagacagcggcaaaggccgtagacaaggcaaaaacaaagttaaagtcggcgaaattcacaacgaagaagacgcgattaaagaaatcgccaaactcgaaaaagccatgcaacaggcggctagggatttgcagtttgaagaagcggctgttcttcgtgataggatacggaatattaaagagagtttgttgtttggggcggaataa

SEQ ID NO: 70609 - DNA, 165 bp, Neisseria meningitidis
atggaaaacgggcaacggaataaccggtttcctttggaaaaacgaattttttatctggagcattcggggcggtatctgatgatttgcgccttatcggattattcccaaaacaaacatactgtcgttatggcaaatttcatctatccggatgaaaaaacggattag

SEQ ID NO: 70610 - DNA, 1218 bp, Neisseria meningitidis; identical to SEQ ID NO: 55105

SEQ ID NO: 70611 - DNA, 1839 bp, Neisseria meningitidis; identical to SEQ ID NO: 47806

SEQ ID NO: 70612 - DNA, 1383 bp, Neisseria meningitidis; identical to SEQ ID NO: 55427

SEQ ID NO: 70613 - DNA, 717 bp, Neisseria meningitidis; identical to SEQ ID NO: 54670

SEQ ID NO: 70614 - DNA, 627 bp, Neisseria meningitidis; identical to SEQ ID NO: 60839

SEQ ID NO: 70615 - DNA, 492 bp, Neisseria meningitidis
atgaaataccgtcgtttttaccgcaatggcggcacttacttttttacggttgtagccaataaacggcagaagattttgaccgatgatgcggtgcgtttggctttacggcaggcggtaatggcggtgcgcgaacggtatccgtttgaaattttggcatgggtgttgatgcccgaccatctgcataccatatggcggctgccggacaatgattctgcttattcggaacgctggcggcagatcaagcggcacagcaaatatttaatcggcggcaatctcaggctttggcaaaaacgcttttgggaacatactatccgcgatgaggccgattttgcctggcattttgattatctgcatttcaatccggtcaaacatggctatgtaggacaaatttccgattggcggttttctacgtttcaccgttatgtcaaacagggtatttatccgcataattggggtggcggcaatgcggacttttctattgaatacgattaa

SEQ ID NO: 70616 - DNA, 1785 bp, Neisseria meningitidis
atggagctgatgactgttttgctgcctttggcggcgttggtgtcgggcgtgttgtttacatggttgctgatgaagggtcggtttcagggcgagtttgccgtattgaacgcgcaattggtggaaaaggcggcaagatgtgattttattgaacaggcacacgcggaaatggcatcggaattggccgttttggatgggaaatacgagcatttgcaagacgaaaattatgctttgggcaaccgtttttccgcagccgaaaagcagattgcccatttgcaggaaaaagaggcggagtcggcgcgtctgaagcagtcgtatatcgagttgcaggaaaaggcgcagggtttggcggttgaaaacgaacgtttggcaacccagctcggacaggagcagaaggcgtttgccgatcaatatgccttggaacgccaaatccgccaaagaatcgaaaccgatttggaagaaagccgccaaactgtccgcgacgtgcaaaacgacctttccgatgtcggcaaccgttttgccgcagccgaaaaacagattgcccatttgcaggaaaaagaggcggaagcggagcgtttgaggcagtcgcatatcgatttgcaggaaaaggcacagggtttggcggttgaaaacgaacgtttgacaacgcaaatcgaacaggaacgccttgcttctgaagagaaactgtccttactgggcgaggcgcgcaagagtttgagcgatcagtttcaaaatcttgccaacacgattttggaagaaaaaagccgccgttttaccgagcagaaccgcgagcagcttcatcaggttttgaacccgttaaacgaacgcatccacggtttcggcgagttggtcaggcaaacctatgataaagaatcgcgcgagcggctgactttggaaaacgaattgaaacggcttcaagggttgaacgcgcagcttcacagcgaggcaaaggctttaaccaacgcgctgaccggtacgcagaataaggttcagggaaattggggcgagatgattctggaaacggttttggaaaattccggccttcagaaagggcgcgaatatgtggtgcaggcggcggctgtccgcaaagaagaagacggcggcacgcgccgccttcagcccgacgttttggttaacctgcccgacaacaagcagattgtgattgattccaaggtttcgctgacggcttatgtgcgctatacgcaagcggcggatgcggatacggcggcgcgcgaactggcggcacacgttgccagcatacgcgcgcatatgaaaggcttgtcgctgaaggattacaccgatttggaaggtgtgaacacattggatttcgtctttatgtttatccctgtcgaaccggcctacctgctggcgttgcagaatgacgcgggattgttccaagagtgtttcgacaaacggattatgctggtcggcccgagtaccttgttggcaaccttgcggacggtggcgaatatttggcgcaacgaacagcaaaatcaaaacgcgctggcgattgcggacgaaggcggcaagctgtatgacaagtttgtcggtttcgtacagacgctcgaaagcgtcggcaaaggcatcgatcaggcgcaaaacagctttcagacggcattcaagcaacttgccgaagggcgcgggaatctggtcggccgcgccgagaaactgcgtctgttgggtgtgaaggcaaacaagcagcttgcacgcgatttgaccgaacgtgccaatgaaacaacggcgttgtcggaatctttggaatatgcggcagaagatgaagcagtctga

SEQ ID NO: 70617 - DNA, 2607 bp, Neisseria meningitidis
atggctgccaaccaacgttaccgcaaaccgctacccggtacggatttggaatactacgacgcgcgtgcggcgtgtgaggacatcaaacccggctcttacgacaagctgccttatacaagccgtatcttggctgagaacttggtcaaccgcgcagacaaagtcgacctgccgacgctgcaaagctggctgggccagttgatagaagggaagcaggaaatcgactttccgtggtatcccgcgcgggtggtgtgccacgatattctggggcagaccgcgctggtggatttggcgggcttgcgcgatgcgattgccgaaaaaggcggcgatcctgccaaagtgaatccggtggtgcaaacccagcttatcgtcgaccactctctggcggtggagtgcggcggttacgatcctgatgccttccgcaaaaaccgcgaaatcgaagaccggcgcaacgaagaccgtttccacttcatcaactggacaaaaaccgcatttgaaaatgtggacgtgattccggcgggcaacggcattatgcaccaaatcaatctggaaaaaatgtcgcccgtcgtccaagtcaaaaacggcgtggctttccccgatacctgcgtcggcacggattcgcacacgccacacgtcgatgcgctgggcgtgatttccgtaggcgtgggcggtttggaagccgaaaccgtaatgttaggccgtgcatccatgatgcgtctgcctgatattgtcggcgttgagttgactggcaaacgtcaacctggcattactgccaccgacatcgtgttggcactgaccgaattcttgcgtaaagagcgcgtggttggcgcatttgtcgaattcttcggcgagggcgcaagaagcctgtctatcggcgaccgagccactatttccaacatgacccctgagttcggcgcgactgccgcgatgttcgctattgatgagcaaaccattgattatttgaaactgacaggccgcgacgacgcgcaagtgaaattggtggaaacctacgccaaaaccgcaggcttgtgggcagatgccttgaaaaccgccgtttatcctcgcgtattgaaatttgatttaagcagcgtaacgcgcaacatggcaggcccaagtaacccgcatgcccgttttgcgactgccgatttggccggcaaaggcttggctaaaccttatgaagagccttcagacggccaaatgcctgacggtgcagtgattattgccgcgattacttcctgtaccaatacttccaatccgcgcaacgttgtcgccgccgcgctgttggcacgcaatgccaaccgcctcggcttgcaacgtaaaccttgggtgaaatcttcgtttgccccgggttcaaaagtagccgaaatctatttgaaagaagcaggcctactgcctgaaatggaaaaactcggcttcggtatcgttgccttcgcatgtaccacctgtaacggcatgagcggtgcgctggattcgaaaatccaaaaagaaatcatcgaccgcgatttgtacgccaccgccgtattatcaggcaaccgcaacttcgacggccgtatccacccgtatgcgaaacaggctttcctcgcttcgcctccgttggtcgttgcctacgcgctggcaggcagtatccgtttcgatattgaaaacgacgtactcggcgttgcagacggcaaggaaatccgcctgaaagacatttggcctgccgatgaagaaatcgatgccgtcgttgccgaatatgtgaaaccgcagcagttccgcgatgtgtatgtaccgatgttcgacaccggcacagcgcaaaaagcacccagtccgctgtacgattggcgtccgatgtccacctacatccgccgtccgccttactgggaaggcgcgctggcaggggaacgcacattaagaggtatgcgtccgctggcgattttgcccgacaacatcaccaccgaccacctctcgccgtccaatgcgattttggccgtcagtgccgcaggcgagtatttggcgaaaatgggtttgcctgaagaagacttcaactcttacgcaacccaccgcggcgaccacttgaccgcccaacgcgctaccttcgccaatccgaaactgtttaacgaaatggtgaaaaacgaagacggcagcgtgcgccaaggctcgttcgctcgcgtcgaacccgaaggcgaaaccatgcgcatgtgggaagccatcgaaacctatatgaaccgcaaacagccgctcatcatcattgccggtgcggactacggtcaaggctcaagccgcgactgggctgcaaaaggcgtacgcctcgccggcgtggaagcgattgttgccgaaggcttcgagcgtatccaccgcaccaacttgatcggtatgggcgtgttgccgttgcagttcaaaccgggtaccaaccgccataccctgcaactggacggtacggaaacctacgacgtggtcggcgaacgtacaccgcgctgcgacctgaccctcgtgattcaccgtaaaaacggcgaaaccgttgaagttcccgttacctgccgcctcgataccgcagaggaagtgctggtgtacgaagccggcggcgtgctgcaacggtttgcacaagactttttagaaggtgtggtagcataa

SEQ ID NO: 70618 - DNA, 1170 bp, Neisseria meningitidis
atgacagcacataaaatcctgcccgtcctgctttccatcatcttaggcgtttctcacacaacggctgcatcgcccgcgcccaacaaactgacggtacacgccgcccccacgctccaaacacccgaaaccctcacagcggcacacatcgttatcgaccttcaaagcaaacagattttatccgccaaaaacatcaatacccctgtcgaaccggcggcactaacccaactgatgaccgcatatctggttttcaaaaacatgaaatcgggaaatatccgatctgaagaaaacttaaaaatacccgaatccgcatgggcttcagaaggaagcagaatgtttgtacgtcccggcgatacggtcagcaccgacaaactcttaaaaggcatgattgcactatccgcaaacgatgccgccctaacccttgccggccggctgggcaacggctcgattgaaaattttgtgcaacaaatgaacaaagaagcccgacgcttgggcatgaagaacactgtattcaaaaacccgacaggcttgagtagagaaggacaggtttccaccgccaaagacctcgcccagctgtctgaagcattgatgcgcgactttccggaatattacccgctgttttccatcaaatctttcaaattcaaaaatatagaacaaaacaaccgcaatatccttttatatagggacaacaatgtaaacggtctgaaagccggacacacagaaagcggcggctacaaccttgccgtgtcatactccggcaacggcaggcacatccttgtcatcacattgggttcggaatcggcggaaacacgcgcatcagacaacagcaagctgctgaactgggcattgcaggccttcgatacgcccaaaatatatccgaaaggcaaaaccgttgcccaaatccaaatttccggaggcagcaaaaaaaccgtccgcgcaggcttcctcaaagaagcctacatcactctgccacataaggaagcgaaaatggcagaacaaattctagaaaccatacagccgattcccgccccagtaaaaaaagggcaaattttaggaaaaatcaaaatcagacaaaacggatacaccattgccgaaaaagaaatcgtcgcactggaaaatgtaaaaaaaagaagccggtggcaaaggctttgggcgtgtctgacagggcagtaa

SEQ ID NO: 70619 - DNA, 807 bp, Neisseria meningitidis; identical to SEQ ID NO: 50298

SEQ ID NO: 70620 - DNA, 291 bp, Neisseria meningitidis; identical to SEQ ID NO: 54579

SEQ ID NO: 70621 - DNA, 198 bp, Neisseria meningitidis; identical to SEQ ID NO: 36305

SEQ ID NO: 70622 - DNA, 579 bp, Neisseria meningitidis; identical to SEQ ID NO: 54434

SEQ ID NO: 70623 - DNA, 639 bp, Neisseria meningitidis; identical to SEQ ID NO: 45470

SEQ ID NO: 70624 - DNA, 1125 bp, Neisseria meningitidis; identical to SEQ ID NO: 61556

SEQ ID NO: 70625 - DNA, 300 bp, Neisseria meningitidis
atgaagaaaatgttcgtgctgttctgtatgctgttctcctgcgccttctcccttgcggcggtaaacatcaatgcggcttcgctgcaggagttggaggcgctgccaggcataggcccggcgaaggcgaaggccattgcggaataccgtgcgcaaaacggtgcgttcaagtctgtagacgatttgaccaaggtaaagggcatcggccctgcggtgctggcgaagctgaaggatcaggcttccgtcggcgcgcccgcaccaaaaggcccagccaaaccggcaacgaccgcagtgaaaaaatag

SEQ ID NO: 70626 - DNA, 537 bp, Neisseria meningitidis; identical to SEQ ID NO: 37832

SEQ ID NO: 70627 - DNA, 1062 bp, Neisseria meningitidis; identical to SEQ ID NO: 55447

SEQ ID NO: 70628 - DNA, 648 bp, Neisseria meningitidis
  misc_feature 625, 626, 627, 628, 629: 'n' is a, c, g or t
atgttggaaattttgttccgccatcaagacttcgtcgccatcaacaaaccgggcggcatatccgtccaccaagacagcggcgagaccggactggcccgaacactcgccatacagttgggcgtagagcgtgtgtggctgctgcaccgattggacaaacagaccagcggcattttactgtttgccctcaacagagaaagcgcgtccgcccttagcggacagtttgccggcaaaagcatcaaaaaaacctatttggcactatccgaccgcaaaccgtccaaaaagcagggttggattaaaggcggaatggaaaaatccagacgcggaatgtggaagttgacgcgcaatacagaaaatatcgccgttacccgattccacagcatcagtatcgccgaaaaactgcggctgttcatcctggaaccgcatacgggcaaaacgcaccaattgagagtggcgatgaaaagtttgggcagtccgattctgggcgacagcttatacggcggaacagaatccgaaaccatgtttctgtatgcatggaaaatacaatttgcctaccaaaaccgacaaatcgaaattgttgcacccttaaaaaacgaatggcagactgaaaatatctctcatgcgctgnnnnncacacacttaattaattaa

SEQ ID NO: 70629 - DNA, 1065 bp, Neisseria meningitidis; identical to SEQ ID NO: 54393

SEQ ID NO: 70630 - DNA, 360 bp, Neisseria meningitidis; identical to SEQ ID NO: 44131

SEQ ID NO: 70631 - DNA, 1215 bp, Neisseria meningitidis
atgagtgaagttgaatatttctcacactttatatcggacggaaaagggaagcttttagaaattccgcagcgaagaggtaagcaagacggggtttttgttgattggatttcattcacattccatgaagatactttactgaaagtttccggttgccctttattttctgatgctgaatacatgtatgtattaagcagaaagctggaagaaattctaggttttggcataacgcgcaaatgcaaatcaaggggcaacaaattctatgaatccatgtataggttaggttcggatgatgttgattatggagaggtgcatttcggaggtcagcgcaatactgttttagttgagttgaaaggtactggttgcagcgttgcaagtccgggttgggagttgaggctaaagcagtttctcgatgattcgataaggacaagaataacgcgaattgacctagcacttgatttttttgatggagagtacacgccggatcaggcgttgttagatcacgataatggtttttttgataacagcaatcaaaggccgaaatctgaaacgatcggtacggcttggcggaatgaggacgggagcggcaagacattttatgtaggtcgcaagaaaaattctcgttttgttcgtgtttatgagaaaggcaggcagcttggagataaagaaagcaaatgggtaaggttcgagatccagtttaattatggagatatagaaatacccttggatattttaataaatcagggttcgtatttctgtggagcttttccaatttgtagaaaatttaaaaatatgccggttcccgaaaggtttgatcagagaaagaaaacgcttaatttaactttcgagcataaattgcattacgcgaaaaacgcggttggaaaactggtcaatttcatgattgaaatgggttttgataatagcgaaattgtggaatctttaaaggcagattcgggatttcccaaaggattagaacctgaaaaatatgctctggaaatgttaaaggacggtttgaaacacggttttattcatgaacagccggatattgatttggaaattgaacttgatgaattgggggttattgcttttaaaaattctgacaaattcgatagggaaaaaaggctttttagtcctgattatgatgtcgagaaagaaaggaaatatcaggaatatttaagtaaagtttatcatcaaaatgtagattatgattatttttaa

SEQ ID NO: 70632 - DNA, 1452 bp, Neisseria meningitidis; identical to SEQ ID NO: 55568

SEQ ID NO: 70633 - DNA, 1746 bp, Neisseria meningitidis; identical to SEQ ID NO: 55272

SEQ ID NO: 70634 - DNA, 465 bp, Neisseria meningitidis; identical to SEQ ID NO: 60399

SEQ ID NO: 70635 - DNA, 801 bp, Neisseria meningitidis; identical to SEQ ID NO: 44476

SEQ ID NO: 70636 - DNA, 516 bp, Neisseria meningitidis; identical to SEQ ID NO: 65658

SEQ ID NO: 70637 - DNA, 297 bp, Neisseria meningitidis; identical to SEQ ID NO: 54683

SEQ ID NO: 70638 - DNA, 1155 bp, Neisseria meningitidis; identical to SEQ ID NO: 55724

SEQ ID NO: 70639 - DNA, 1860 bp, Neisseria meningitidis
atgccagaataccgctccaaaacctccacccacggccgcaatatggcgggcgcacgtgcattgtggcgcgccaccggcgtgatggaaaccgacttcggcaagcccatcatcgccgttgccaactccttcacccaattcgtgcccggccatgtccacctgcacaatatgggccagctggttgcccgcgaaatcgaaaaagccggcgcaatcgccaaagaattcaacaccatcgccatcgacgacggcatcgctatgggacacagcggtatgctgtattccctgcccagccgcgatttgattgccgactccatcgaatatatggtcaatgcccactgcgccgacgcgctggtgtgcatttccaactgcgacaaaatcaccccgggcatgctgattgccgcgatgcgcctgaacatccccaccatcttcgtctccggcggcccgatggaagcaggtaaagttatcggcgtggcaaacatccaacccgaacgccgcttggacttgattgacgcgatgattgaatcggcggacgacaatgtcagcaaccggcaagtcgaggaagtcgaacaaaacgcctgcccgacctgcggctcgtgttcgggtatgtttacggcaaactcgatgaactgcctgaccgaagcactcggcctttccctgcccggcaacggttcgtatttggcgacccacgccggccgcaaagaattgttcctcgaagccggccgtatgattgtcgaaatcaccaaacgctattacgagcaaaacgatgaaaccgtactgccgcgcaacattgccaccaaaaaagcgtttgaaaacgctatgacgatggatattgcgatgggcggcagcaccaataccattttgcacctgttggccgttgccaacgaagccggtgtcgatttcaaaatggccgacattgaccgcttaagccgcgttgtgccctgcatctgcaaaaccgcacccaacaaccacgactactatatggaagacgtgcaccgagccggcggcatcttcgccatcctgaaagaattggacaaagcgggcaagctgcacaccgacgtgcacactatccacgcaccgacgctgaaagacgcgattgaaaaatgggacgtaaccaaccctgaaaacacccgcgccatcgaacgcttcaaagccgcgcccggcggcgtacgcaccacccaagcgttctcgcaaaaccgtatgtggaaaaccctcgacctcgaccgcgaaaaaggctgtatccgcgacgtggcacacgcctactcgcaagacggcggtttggcggtcttgttcggcaacatcgccgaacgcggctgcgtggtaaaaaccgcaggcgtggacgagagcatcctcaaatttaccggccgcgcgcgcgtgtttgaaagccaggaagccgctgtcgaaggcattttgggcaaccaaatcgtcgctggcgacatcgtcatcatccgctacgaaggcccgaaaggcggcccgggcatgcaggaaatgctgtatccgacttcctacctgaaatctaaaggcctcggcaaagcctgcgctctcttaaccgacggacgcttctccggcggcacatcaggtttgtccatcggacacgcctcgcccgaagcggcggaaggtggcgcgatcggtttggtacacgaaggcgataccgtcgaaatcgacatccccaaccgcagcatccaccttgtcatttccgatgaagagcttgccgcgcgccgtgccgaaatggaagcacgcggcagcaaagcgtggaaaccggaaaaccgcgaccgctacgtctccgccgcattaagagcttacggcgcgatggcgacttccgccgacaaaggcgcggtgcgcgacgtagcgcaaatcgaaagataa

SEQ ID NO: 70640 - DNA, 399 bp, Neisseria meningitidis; identical to SEQ ID NO: 44864

SEQ ID NO: 70641 - DNA, 303 bp, Neisseria meningitidis; identical to SEQ ID NO: 56191

SEQ ID NO: 70642 - DNA, 558 bp, Neisseria meningitidis; identical to SEQ ID NO: 56097

SEQ ID NO: 70643 - DNA, 888 bp, Neisseria meningitidis
atgcagaaatccaaattatcttggttcttgaaactgatgttggcactgtcgctggcgtttctgtatatcccgctggttgttttggtcatctattcgtttaacgaatccaagctggtaaccgtttggggcggcttttcgaccaagtggtacggcgcattgctggaaaacgacaccatcttggaagccgcttggctgtcgctgcggattgccgttgtgtcttcgcttgctgccgtcgttttgggcacgctggcaggctatgcgatggcgcggattaaacgttttcgcggcagtaccttgttcgccggtatgatttccgcacctatggtgatgcccgacgtgattaccggtctgtctatgctgctgctgattattcaggtacagatatttttgcagggcagcgaatggttacaacatctctacttcgatcgtggctttttcaccatcttcctcggacatacgacgctgtgtatggcgtacattacagttgttatccgttcgcgtctggttgagcttgaccaatcgctcgaagaagccgcaatggatttgggcgcgcgtccgctgaaaatcttttttgtcatcactttgcctttgattgcccctgccatcgcttcaggctttctgctcggcattaccctgtctttggatgatttggtaattacctcattcctctccggccccggttcatccacattgccgcaggtgattttctccaaaatcaagctgggtcttgatccgcagatgaacgttttggcaaccatcctgatcggcatcatcggaacattggtcatcatcgtcaattattggatgatgaggcaggcgaccaggcgtgaccgagaagcggcagaagcctaccgccaggaaaaactggctgctgagaaagcgcattga

SEQ ID NO: 70644 - DNA, 1044 bp, Neisseria meningitidis; identical to SEQ ID NO: 54262

SEQ ID NO: 70645 - DNA, 279 bp, Neisseria meningitidis; identical to SEQ ID NO: 36778

SEQ ID NO: 70646 - DNA, 1224 bp, Neisseria meningitidis; identical to SEQ ID NO: 50754

SEQ ID NO: 70647 - DNA, 309 bp, Neisseria meningitidis; identical to SEQ ID NO: 36432

SEQ ID NO: 70648 - DNA, 2286 bp, Neisseria meningitidis
atgaataccaaactgacaaaaatcatttccggtctctttgtcgcaaccgccgcctttcagacagcatcggcaggaaacattacagacatcaaagtttcctccctgcccaacaaacagaaaatcgtcaaagtcagctttgacaaagagattgtcaacccgaccggcttcgtaacctcctcaccggcccgcatcgccttggactttgaacaaaccggcatttccatggatcaacaggtactcgaatatgccgatcccctgttgagcaaaatcagtgccgcacaaaacagcagccgtgcgcgtctggttctgaatctgaacaaaccgggccaatacaataccgaagtacgcgggaacaaagtttggatattcattaacgaatcggacgataccgtgtccgcccccgcacgccccgccgtaaaagccgcgcctgccgcaccggcaaaacaacaggctgccgcaccgtctaccaagtccgcagtatccgtatccaaaccctttaccccggcaaaacaacaggctgccgcaccgtttaccgagtccgtagtatccgtatccgcaccgttcagcccggcaaaacaacaggcggcggcatcagcaaaacaacagacggcagcaccagcaaaacaacaggcggcaacaccagcaaaacaaaccaatatcgatttccgcaaagacggcaaaaatgccggcattatcgaattggctgcattgggctttgccgggcagcccgacatcagccaacagcacgaccacatcatcgttacgctgaaaaaccataccctgccgaccacgctccaacgcagtttggatgtggcagactttaaaacaccggttcaaaaggttacgctgaaacgcctcaataacgacacccagctgattatcacaacagctggcaactgggaactcgtcaacaaatccgccgcgcccggatactttaccttccaagtcctgccgaaaaaacaaaacctcgagtcaggcggcgtgaacaatgcgcccaaaaccttcacaggccggaaaatctcccttgacttccaagatgtcgaaatccgcaccatcctgcagattttggcaaaagaatccgggatgaacattgttgccagcgactccgtcaacggcaaaatgaccctctccctcaaagacgtaccttgggatcaggctttggatttggttatgcaggcacgcaacctcgatatgcgccagcaagggaacatcgtcaacatcgcgccccgcgacgagctgcttgccaaagacaaagccttcttacaggcggaaaaagacattgccgatctgggcgcgctgtattcacaaaacttccaattgaaatacaaaaatgtggaagaattccgcagcatcctgcgtttggacaatgccgacacaaccggaaaccgcaatacgcttgtcagcggcaggggcagcgtgctgatcgatcccgccaccaataccctgattgttaccgatacccgcagcgtcatcgaaaaattccgcaaactgattgacgaattggacgtacccgcgcaacaagtgatgattgaggcgcgtatcgtcgaagcggcagacggcttctcgcgcgatttgggcgttaaattcggcgcgacaggcaagaaaaagctgaaaaatgatacaagcgcattcggctggggggtaaactccggcttcggcggcgacgataaatggggggccgaaaccaaaatcaacctgccgattaccgctgccgcaaacagcatttcgctggtgcgcgcgatttcctccggtgccttgaatttggaattgtccgcatccgaatcgctttcaaaaaccaaaacgcttgccaatccgcgcgtgctgacccaaaaccgcaaagaggccaaaatcgaatccggttacgaaattcctttcaccgtaacctcaatcgcgaacggcggcagcagcacgaacacggaactcaaaaaagccgtcttggggctgaccgttacgccgaacatcacgcccgacggccaaatcattatgaccgtcaaaatcaacaaggactcgcctgcgcaatgtgcctccggtaatcagacgatcctgtgtatttcgaccaaaaacctgaatacgcaggctatggttgaaaacggcggcacattgattgtcggcggtatttatgaagaagacaacggcaatacgctgaccaaagtccccctgttgggcgacatccccgttatcggcaacctctttaaaacacgcgggaaaaaaaccgaccgccgcgaactgctgattttcattaccccgaggattatgggtacggccggcaacagcctgcgctattga

SEQ ID NO: 70649 - DNA, 777 bp, Neisseria meningitidis; identical to SEQ ID NO: 38952

SEQ ID NO: 70650 - DNA, 219 bp, Neisseria meningitidis; identical to SEQ ID NO: 46127

SEQ ID NO: 70651 - DNA, 693 bp, Neisseria meningitidis; identical to SEQ ID NO: 54707

SEQ ID NO: 70652 - DNA, 1149 bp, Neisseria meningitidis
atgaatactcctccttttgtctgttggattttttgcaaggtcatcgacaatttcggcgacatcggcgtttcgtggcggctcgcccgtgttttgcaccgcgaactcggttggcaggtgcatttgtggacggacgatgtgtccgccttgcgtgcgctttgccctgatttgcccgatgttccctgcgttcatcaggatattcatgtccgcacttggcattccgatgcggcggatatcgatactgcccttgttcccgatatcgttatcgaaacttttgcctgcgacctgcccgaaaatgtgctgcacatcatccgccgacacaagccgctttggctgaattgggaatatttgagcgcggaagaaagcaatgaaaggctgcatctgatgccttcgctgcaggagagtgttcaaaaatatttttggtttatgggtttcagcgaaaaaagcggcgggttgatacgcgaacgcgattaccgaaatgccgtccgtttcgataccgaagccttgcgagagcggctgatgcttcccgaaaaaaacgcccccgaatggctgcttttcggctatcggagcgatgtttgggcaaagtggctggaaatgtggcgacaggcaggcagcccgatgacactgttgctggcggggacgcaaatcatcgacagcctcaaacaaagcggcgttattccgcaagatgccctgcaaaacgacggcgatgtttttcagacggcatccgtccgcctcgtcaaaatccctttcgtgccgcaacaggacttcgacaaactgctgcacctcgccgactgcgccgtcatccgcggcgaagacagtttcgtgcgcgcccagcttgccggaaaacccttcttttggcacatctacccgcaagacgagaatgtccatctcgacaaactccacgccttttgggataaggcgcatggattttactcgcccgaaaccgcctcggcacaccgccgcctttcagacgacctcaacggcggagaggctttatccgccacgcaacgcctcgaatgttggcaaatcctgcaacaacaccaaaacggctggcggcaaggcgcggaggattggagccgttatcttttcgggcagccttccgcatccgaaaaactcgccgcctttgtttcaaagcatcaaaaaatacgctag

SEQ ID NO: 70653 - DNA, 438 bp, Neisseria meningitidis
atgcccgtgaaaaaagttgaaaaaaacatcttggtgctgcacagctcggacaaaatgttcgagctggtcgataaggttgaggattacccgcactttctgccgtggtacagcaaaaccgaggtcatcgggcgtagcggcaacgaactgaaggcacggctgtttatggactatatgcacgttcgccaatcattcgccacgcacaaccgcaacattccgggcagggaaatccgtatggaactgctcgagggtccgttcaaaaccttacgtggaacgtggaaatttatcgatttgggcgacgatatgtgcaaaatcgaattcaatttggaatacgatttttccaatgccgttttgtccgccttaatttcccccgtcttcaaccacctttccgccacgctggtcgaagcgttcgtcaaagaggcagaccgccgttatgcttga

SEQ ID NO: 70654 - DNA, 567 bp, Neisseria meningitidis
  misc_feature 6, 7, 8, 9, 10: 'n' is a, c, g or t
gtgtgnnnnnaccgaagcaaccgtcccattaaggacggcagttacctcgtcatcgccgaatatcagcctactttctggtcaaaaaacaaagcaggctggaaacaggcgggcatcaaagaaatgcctgacgcaagctattgcgaacaaacccgtatgttcggcaaaaacatcgtcaacgtcggacacgaaagcgcggacaccgccatcatcaccaaaccggtcggacaaaacttggaaatcgtcccgctggacaatcccgccaacattcacgtaggcgaacgcttcaaagtccgcgttctgttccgtggcgaaccgctgcccaatgccaccgttaccgccacctttgacggcttcgacaccagcgaccgcagcaaaacgcacaaaaccgaagcacaggctttctccgacagcacagacgacaaaggcgaagtggacatcatccccttgcgccaaggcttctggaaagccaatgtcgaacacaaagccgacttccccgatcaaagcgtgtgccaaaaacaggcgaactactcgactttaaccttccaaatcggccattcgcaccattaa

SEQ ID NO: 70655 - DNA, 4179 bp, Neisseria meningitidis
atgaactattcgtttaccgagaaaaaacgtatccgtaagagttttgcaaagcgggaaaatgttttggaagttcctttcttgctagcaacccaaattgattcttatgcgaagtttttgcagctggaaaatgcttttgacaaacgtaccgatgacggtctgcaggcggcatttaattctattttcccgattgtgagccataacggttatgcgcgattggagtttgtgcattacacattgggcgagcctttgttcgatattcccgaatgtcagttgcgcggaatcacttatgcagcccccttgcgcgcgcgtatccgtttggtgattttggataaggaagcatctaaaccgacggtaaaagaagttcgtgaaaacgaagtgtatatgggcgaaattccgttgatgaccccgagcggttcttttgtgattaacggcacagagcgtgtgattgtctcccagttgcaccgttcgcccggcgtattcttcgagcatgacaaaggtaagacgcactcttccggcaagttgttattctccgcccgtatcattccctaccgcggttcatggttggattttgaatttgacccgaaagatttgctgtatttccgtatcgaccgccgccgtaaaatgccggtaacgattttgttgaaggctttgggctacggcaatgagcaaatcttggatattttctacgacaaagaaacgttctatttgtcttcaaacggtgttcaaaccgatttggtcgcaggccgtctgaaaggcgaaactgccaaggtcgatatcttggataaagaaggcaatgtattggttgccaaaggtaagcgcattactgcgaaaaatatccgtgatattaccaatgcaggcctgacccgtttggatgtagaaccggaaagcctgctgggtaaagcattggctgccgatctgattgattcggaaaccggcgaggtattggcttctgccaatgatgaaattacagaagagttgttggccaaatttgatatcaacggcgtaaaagaaattacgaccctttatatcaatgagttggatcagggtgcttatatctccaacaccttgcgtacggatgagactgccggccggcaggcggcgcgtgttgcgatttaccgtatgatgcgtccgggcgaaccgcccaccgaagaggcggtcgagcaattgtttaaccgcttgttcttcagtgaagacagctacgatttgtcccgcgtaggccgtatgaaatttaatacgcgcacatacgaacaaaaactgtccgaagcccaacaaaactcttggtacggccgcctgctgaacgaaacgtttgccggtgctgccgaaaaaggcggttatgtcctgagcgtcgaagatattgtcgcctcgattgcgactttggtcgagttgcgtaacggccatggtgaagttgacgatatcgatcacttgggcaaccgccgagtacgttcggtaggcgagctgactgaaaaccaattccgcagcggtttggcccgtgtggaacgtgccgttaaagagcgtttgaatcaggcggaatcagaaaacttgatgccgcacgatttgattaatgcaaaacctgtttctgccgctattaaagaattcttcggctccagccaattgagtcagtttatggatcagaccaaccccttgtctgaagtaacccataaacgccgtgtatccgcattgggtccgggcggtttgacccgcgagcgtgccggcttcgaggtgcgggacgtgcatccgacccactacggccgcgtatgtccgattgaaacgcctgaaggtccgaacatcggtttgatcaactcattgtccgtttatgcgcgcaccaatgattacggtttcttggaaacgccttaccgccgcgttatcgacggcaaagtaaccgaggaaatcgattacttgtctgccatcgaagaaggccgctatgtgattgcacaggcgaatgccgatttggattcagacggcaatctgattggagatttggttacctgtcgtgaaaaaggcgaaaccattatggcaacgcccgaccgcgtccaatatatggacgtggcaaccggtcaggtggtatccgttgcggcatccctgattccgttcttggaacatgatgacgcgaaccgcgcattgatgggtgccaacatgcaacgtcaggcagtgccttgcctgcgtcctgaaaaaccgatggtcggtaccggtatcgagcgttccgttgccgttgactctgctactgcaatcgttgcccgccgaggcggcgtggtcgagtatgtcgatgccaaccgcgttgtgattcgtgtccatgacgacgaagcgactgccggcgaagtgggtgtcgatatttacaacttggtcaaattcacccgttccaaccaatctaccaacatcaaccaacgtccggccgtcaaagccggagatgtgttgcagcgcggcgatttggtggccgacggcgcgtccaccgatttgggagaattggctttgggtcagaatatgaccatcgccttcatgccgtggaacggttacaactacgaagactcgattctgatttccgaaaaagtggctgcggacgaccgctatacttcgattcacattgaggaattgaatgtcgttgcccgcgataccaagctgggtgcggaagacattacccgcgatattccgaacttgtccgagcgtatgcaaaaccgtttggacgaatccggtatcgtttatatcggtgcggaagtagaagccggcgatgtgttggtaggcaaggtaacgcctaaaggcgaaacccaactgacgccggaagaaaaactgctgcgcgccatcttcggcgaaaaagcatctgacgtaaaagatacttcattgcgtatgcctaccggcatgagcggtaccgttatcgacgttcaagtcttcactcgtgaaggtattcaacgcgacaaacgcgcccaatccattatcgattccgagttgaaacgctaccgtttggatttgaacgaccaattgcgtattttcgacaacgacgcattcgaccgtatcgagcgtatgattgtcggtcagaaagccaacggcggcccgatgaagctggccaaaggcagtgaaatcacgaccgaatatctggcgggtctgccgagcaggcacgattggttcgatatccgtctgaccgatgaagatttggccaagcagttggaactgattaaagtgagcctgcaacaaaaacgcgaagaagcggacgagttatacgaaatcaagaagaaaaaactgacccaaggcgacgaattgcaacccggcgtacaaaaaatggtgaaagtatttatcgccatcaaacgccgtctgcaagccggtgacaaaatggcgggccgccacggtaacaaaggcgtggtatcgcgcattctgccagtggaagacatgccttacatggcggacggccgtccggtagacatcgtactgaacccattgggcgtaccttcccgtatgaacatcggtcagattttggaagttcacttgggttgggcggcaaaaggtatcggcgaacgcatcgaccgtatgctgaaagagcaacgcaaagcaggcgagctgcgcgagttcttgaacaaactctacaacggcagcggtaagaaagaagatttggatgccctgactgatgaagaaatcatcgaactggcctccaacctgcgcaaaggcgcatctttcgcctctcctgtattcgacggtgcgaaagagtctgaaatccgcgaaatgttgaacttggcttacccaagcgaagatcctgaggttgagaaactgggcttcaacgacagcaaaacccaaatcacgctgtatgacggacgctctggcgaaccgtttgaccgcaaggtaacagtcggtgtgatgcactatctgaaactgcaccacttggttgacgaaaaaatgcacgcccgttctaccggcccgtacagtctggttacccagcagcctttgggcggtaaagcccagttcggcggccaacgtttcggtgagatggaggtttgggcattggaggcatacggcgcggcatacacgctgcaagagatgctgactgtgaagtctgacgacgtgaacggtcgtaccaaaatgtacgaaaacatcgtcaaaggcgaacacaaaatcgatgccggtatgcccgagtctttcaacgtattggtcaaagagattcgctcactgggcttggatatcgatttggaacgttactaa

SEQ ID NO: 70656 - DNA, 486 bp, Neisseria meningitidis
atgagtaataaaatggaacaaaaagggtttacattgattgagatgatgatagtcgtcgcgatactcggcattatcagcgtcattgccataccttcttatcaaagttatattgaaaaaggctatcagtcccagctttatacggagatggtcggtatcaacaatatttccaaacagtttattttgaaaaatcccctggacgataatcagaccatcaagagcaaactggaaatatttgtctcaggctataagatgaatccgaaaattgccgaaaaatataatgtttcggtgcattttgtcaataaggaaaaaccaagggcatacagcttggtcggcgttccaaagacggggacgggttatactttgtcggtatggatgaacagcgtgggcgacggatacaaatgccgtgatgccgcttctgcccgagcctattcggagaccttgtccgcagatgtcggctgtgaagccttctctaatcgtaaaaaatag

SEQ ID NO: 70657 - DNA, 1311 bp, Neisseria meningitidis; identical to SEQ ID NO: 54278

SEQ ID NO: 70658 - DNA, 540 bp, Neisseria meningitidis
  misc_feature 4, 5, 6, 7, 8: 'n' is a, c, g or t
gtgnnnnntgatgcggcggttgcgggtgacgatatttgggtgtcggggcgtgtcggtatggcggcggcggctttgaactgccgtctgaaacggtgtgtgttgccggatgatgtgtttgccgaatgcgaacaaaagctgctccgccccgagccaagggttgggctggggcttgcgctgttgccgtttgcccgggcggcgcaggatgtttcagacggcctcgcgcaagatttggggcatatcctgaccgcttccggcgtgggggcggaaatttgggccgattcgctgccgtctttatccgtattgaaagatattttgccccgagcgcaatggctgtcttatactttggcgggcggcgacgattacgagctggtgtttaccgcgccggaaagttgccgcagccgcgtgcttgatgcggcagaacggtgcggcgtgccggtaacgcgcatcggcaaaatcaacggaggatgccgtctgaaggttttagatgctgacggcagggaattggaactacattctttaggattcgatcattttggctga

SEQ ID NO: 70659 - DNA, 684 bp, Neisseria meningitidis; identical to SEQ ID NO: 55750

SEQ ID NO: 70660 - DNA, 1377 bp, Neisseria meningitidis
atgcacgacaaaacctggtccggacgtttcaacgaacccgtttccgaactcgtcaaacaatacaccgcctccatcggtttcgaccgacggcttgccgaatgggacatccaaggctcgctggcacacgcgcaaatgttgaaagaaaccggcgtgttggacgaaggcgatttggcggacatccgtcagggcatggcggaaatcctcgaagaaatccgcagcggcaaaatcgaatggtcgtccgatttggaagatgtccacatgaacatcgaacgccgcctgaccgacaaaatcggcgacgcgggcaaacgcctgcacaccggccgcagccgcaacgaccaagtcgccaccgacatccgcctgtggctgcgcgaccagattaccgttattcaaaacctgattcaaaaccttcagacggcattgctggatttggcggaacaaaacgccgaaaccgttatgcctggctttacccacctgcaagtcgcccagcccgtcagcttcggacaccatatgctcgcctacgtcgaaatgctcggccgcgataacgaacggatggcggactgccgccgccgcgtcaaccgtatgccgctcggcgcagccgcccttgccggtacgacttatccgattcggcgcgaaatcaccgccgaactgttgggctttgaacaaatctgccaaaactcgctcgatgccgtatccgaccgcgattttgccatcgagttcaccgccgccgcctcgctggttatggttcacttgagccgcctgtctgaagaattgattttgtggatgagtccgcgtttcggctttatcgacatcgctgaccgtttctgcacaggttcgtccatcatgccgcagaagaaaaatcccgacgtgcccgaactcgtgcgcggcaaatccggacgcgttatcgggcaccttatcggcctgattaccctgatgaaatcccaacccttggcgtacaacaaagacaatcaggaagacaaagaacccttgttcgacaccgccgacacgcttatcgacacgttgcggatttacgccgatatgatgcgcggcgtaaccgtcaaacccgacaatatgcgcaccgccgtgatgcagggcttcgctaccgccaccgatttggcagattacttggtaaaaaaaggcatgcctttccgcgatgcccacgaagtcgtcgcccaagccgtgcgccacgccgaccaagcgggtgtcgatttgagcaaactgccgctcgaagtcttacaaggtttcagcgatttgattgccgacgacgtttacggcgtgctgacacccgaaggcagcttaaacgcgcgcaaccacttgggcggtaccgcgcctgaacaagtccgtttccaagtcaaacgctggcgggaaatgttggcttaa

SEQ ID NO: 70661 - DNA, 204 bp, Neisseria meningitidis; identical to SEQ ID NO: 37144

SEQ ID NO: 70662 - DNA, 891 bp, Neisseria meningitidis; identical to SEQ ID NO: 61280

SEQ ID NO: 70663 - DNA, 519 bp, Neisseria meningitidis
  misc_feature 504, 505, 506, 507, 508: 'n' is a, c, g or t
atgacaatgattttaagcattttaagcctgttttttatcatcagactgttatttttagccgtctctattaaacatgaaaaagccttgattgccaaaggggcgaaacaatacggaaaaaccaattccacgctgcttgcggcagttcatacgctttattatttggcgtgttttgtttgggtatggctttctgacactgcttttaatggcatatccttgattggtacgctgacggtgatggcttcgtttgtgatattgtcattgattattaagcagttgggggagatttggacggttaaaatctatattttaccaaatcatcaaattaatcgttcgtggttgtttaaaacattccgccaccccaattattttttaaacatcatacccgaactgattggcatcgccttattatgtcaagcgtggtatgttttattgattggcctgcccatttatttgctggtcttatttaagcgtatccgacaagaagaacaggcgatggcaacactnnnnncacacacttaa

SEQ ID NO: 70664 - DNA, 1116 bp, Neisseria meningitidis
atgaaagtaggtttcgtcggctggcgcggtatggtcggttcggttttgatgcagcgtatgaaagaagaaaacgacttcgcccacattcctgaagcgtttttctttaccacttccaacgtcggcggcgcagcccctgatttcggtcaggcagccaaaacattgttggatgccaacgatgttgccgaattggcaaaaatggacatcatcgttacctgtcagggcggcgattacaccaaatccgtgttccaagccctgcgcgacagcggctggaacggctactgggttgacgcggcatcttctctgcgcatgaaagacgacgcgattatcgtcctcgaccctgtcaaccgcaacgttatcgacaacggcctcaaaaacggcgtgaaaaactacatcggcggcaactgcaccgtctccctgatgctgatggctttgggcggcctgttccaaaacgatttggtcgaatgggcaaccagcatgacctaccaagccgcttccggcgcaggtgcgaaaaacatgcgcgaactcatcagcggtatgggcgcggttcacgcccaagtggcagacgaacttgccgatcctgccggctcgattctcgacatcgaccgcaaagtatccgatttcctgcgcagcgaagactatccgaaagccaacttcggcgtaccgctcgccggcagcctgattccgtggattgacgtggatttgggcaacggtcaatctaaagaagaatggaaaggcggtgtggaaaccaacaaaatcctcggccgcagcgacaatccgaccgtaatcgacggcttatgcgtacgcatcggctctatgcgctgccacagccaagccctcaccctgaagctgaaaaaagacctgcctgtttccgaaatcgaagcgattttggcaggtgcaaacgactgggtgaaagtcatccccaatgaaaaagaagccagcatacacgagctgactcctgccaaagttaccggcacgctgtccgtccctgtcggacgcatccgcaaactgggcatgggcggcgaatacatcagcgcgttcaccgtcggcgaccagctcttgtggggcgcggccgagccgctgcgccgcgtattgcgtatcgtgttgggcagcctgtaa

SEQ ID NO: 70665 - DNA, 1287 bp, Neisseria meningitidis
atgacggcacaacaccaaaccccgctccgcttcattaccgccggcagcgtcgatgacggcaaaagcaccctaatcggacgactgctctacgacagcaaagccctgctgtccgaccaaatcaaaaccttggaatccggcaaaagcaacggtttgaaagaaaccatagacttctccatcctgaccgacggactggaagccgaacgcgaacagggcattacgatcgatgtggcataccgctatttttccacggcgaaacggaaattcatcatcgccgacacgccggggcacgaacaatacacgcgcaatatggttacgggcgcaagcaccgcttcggcggcagtcgtactggttgacgcatcccaactggatttcggcgcgcagcccttgcagcttctgccgcagaccaaacgccattccgccatcctccgccaactcaactgcccgcatattgtggtggcggtcaacaaaatggacctgctggattacagcgaagacaaattcaacgccattgtggaggcataccgccgacttgccgaacagctcggtttgaaagacgtgcatttcgtaccggtgtccgcactcttgggcgacaacatcgtttaccccggcggcaatatgccttggtataaaggcgaacccttattgtccattttggaaaacctgccgggggcggacgaaaccggtcgttccgctgccgatttttatttccccgtccaactggtcgtccgccaagatgccgacaaggccgatgatttccgaggctatcaggggcgcatcgaacgcggttcggtcgccgtcgggcaaaccgtccgcatcgaaccgaacgggctgaccgccgaagtgtccgaaatcatcacacccaaaggcgaagtggcgcaggcttttgccggcgaggcggcaaccctccggctggatcgcgacatcgatgtttcgcgcggcgacctttttgtcgataaaaattccccgctcgccccgcaaaaacatctggaagtcacgctttgctggtttgacgaacgtccgctcaacaccgcgcgcaaatacctgctcaagcacggcacgcaaaccgtgtcggcaaaagtcggggaaattgaaagcgttttggatgtccgcacgctggaacaagaggccggcgcggaatccttgaagatgaacgacatcgccaaagtccgcatcaaccttcaaaaacccgttacggcaacgccttatgcggaaaacaccgccgccggttcgtttatcctgatagacgaagcgacatacggcactgttgcggcaggtatgattttatga

SEQ ID NO: 70666 - DNA, 798 bp, Neisseria meningitidis
atggataccgcacaaaaacaacgctgggcaataaccctatcctatgacggcagccgcttttacggctggcagaaacaggctgacggcgtaccgaccgttcaggcggcattggaaaacgcacttgcccaaatagcaggggaagcggtttccaccattgttgccggcaggaccgacaccggcgtgcatgccaccgcccaagtcgtccacttcgacacaactgccgcccgtccccaacaggcatgggtgcgcggcgtaaatgcccacctgcccgaaggcattgccgttttgcacgcccgacaggtcgcccccgaatttcacgcccgcttcgacgcatacggacggcattaccgctacctgctcgaatccgtccccgtccgttcccccctgctcaaaaacagggcaggctggacacacctcaaactcgacatcgaaccgatgcgtcgggctgccgcctatttgatcggcgaacaagacttctccagcttccgcgccgccgaatgccaagcaaaatcccccgtcaaaaccatctaccgcgccgaccttacccaaagctcaggactcgtccgcctcgatttgcacggcaacgcctttttgcaccatatggtacgcaacatcatgggcgcgctcgtttatgtcggcagcggcagactcagcgtcgaaggcttcgccgcactgattcaagaacgcagccgcctcaaagccccaccgaccttcatgcccgacggactctacctgaccggcgtcgactatcccgaggcatatggcatcgtccgcccccaaatccccgaatggctttaa

SEQ ID NO: 70667 - DNA, 966 bp, Neisseria meningitidis
atgagctacacgcaactgacccaaggcgaacgataccacatccaatacctgtcccgccactgcaccgtcaccgaaatcgccaaacagctgaaccgccacaaaagcaccatcagccgcgaaatcagacggcaccgcacccaagggcagcaatacagcgccgaaaaagcccagcggcaaagccggactatcaaacagcgtaagcgacaaccctataagctcgattcgcagctgattcagcacatcgacacccttatccgccgcaaactcagtcccgaacaagtatgcgcctacctgtgcaaacaccaccagatcacgctccaccacagcaccatttaccgctaccttcgccaagacaaaagcaacggcagcacgttgtggcaacatctcagaatatgcagcaaaccctaccgcaaacgctacggcagcacatggaccagaggcaaagtacccaaccgtgtcggcatagaaaaccgacccgctatcgtcaaccagaaatcccgtatcggcgattgggaagccgacaccattgtcggcaaaggacagaaaagcgcattattgaccttggtcgaacgcgttacccgctacaccatcatctgcaaattggatagcctcaaagccgaagacactgcccgggcagctgttagggcattaaaggcacataaagacagggtgcacaccattaccatggataacggcaaagagttctaccaacacaccaaaataaccaaagcattgaaagcggagacttatttttgtcgcccttaccattcttgggagaaagggctgaatgagaacaccaacggactcatccggcaatacttccccaaacaaaccgatttccgtaacatcagtgatcgggagatacgcagggttcaagatgagttgaaccaccgaccaagaaaaacacttggctacgaaacgccaagtgttttattcttgaatctgttccaaccactaatacactag

SEQ ID NO: 70668 - DNA, 1194 bp, Neisseria meningitidis; identical to SEQ ID NO: 55493

SEQ ID NO: 70669 - DNA, 351 bp, Neisseria meningitidis; identical to SEQ ID NO: 54616

SEQ ID NO: 70670 - DNA, 495 bp, Neisseria meningitidis; identical to SEQ ID NO: 61163

SEQ ID NO: 70671 - DNA, 306 bp, Neisseria meningitidis; identical to SEQ ID NO: 37429

SEQ ID NO: 70672 - DNA, 492 bp, Neisseria meningitidis; identical to SEQ ID NO: 54307

SEQ ID NO: 70673 - DNA, 957 bp, Neisseria meningitidis; identical to SEQ ID NO: 55343

SEQ ID NO: 70674 - DNA, 732 bp, Neisseria meningitidis
ttggtcaaaacggcagacggctacaaagccattgcccatattcaagccggcgaccgcgtcttcgccaaggacgaggcaagcggaaaaacgggatacaaacccgttaccgcccgatacggcaatccgtatcaagaaaccgtttacattgaaatttcagacggcatcggcaacaaccaaaccctgatttccaataaaatccacccgttttacagtcaaggaaaatggatacaggcaggtcgtctgaaaaaaggcgacaccctgctttccgaaagcggcgcaaaacagacggttcaaaacattaccttcaaacagcagccgctcaaagcctacaatctgaccgtcgccgattggcatacctacttcgtcaagggcagtcaggcggaaacggaaggggtttgggttcataatgattgtccgtatgataaaggcaaccaacgatataaagacgcttcttatcatggcaaaaatgataattctgtgaaaagtagagcaccaacaaacggacaagcagctcttgataattccgttcaagttaaatcaacttctcctcgaagagttggggttgataaagccaataatgaaatcgttgtattagacaaaactcaaacttttaataacggttttgcggaatatcacgggcatgtcagaagttggcaagatttgcataccgatcagaaaaatgctttaaaaaaagcaggattggttaattcaaaaggaaaaatcaaaaaatga

SEQ ID NO: 70675 - DNA, 627 bp, Neisseria meningitidis; identical to SEQ ID NO: 54372

SEQ ID NO: 70676 - DNA, 1086 bp, Neisseria meningitidis; identical to SEQ ID NO: 43799

SEQ ID NO: 70677 - DNA, 1359 bp, Neisseria meningitidis
atgaaaccactggacctaaatttcatctgccaagccctcaagcttccgatgccgtctgaaagcaaacccgtgtcgcgcatcgtaaccgacagccgcgacatccgcgcgggcgatgtgtttttcgcattggcgggcgggcggtttgatgcgcatgattttgttgaagacgtattggctgctggtgcggcggcggttgtggtttcgcgcgaagattgcgttgcaatggatggcgcgttgaaagtcgatgacacgcttaccgcgttgcaaatggtggcgaaggcgtggcgcgagaatgtgaacccgtttgtgttcggtattaccggttcgggcggcaagacgacggtgaaggaaatgttggctgcggtattgcgccgccgtttcggcgataatgccgttttggcgacggcaggcaacttcaacaaccacatcggattgccgttgactttgttgaaattaaacgaaaaacaccgctatgccgtcatcgaaatgggcatgaaccattttggcgaactggcggttttgacacaaatcgccaaacccgatgccgctttgatcaacaacgccatgcgcgcccatgtcggctgcggttttgacggagtgggcgatattgccaaagcgaaaagcgagatttatcaaggcttatgttcagacggcatggcactgattcctcaagaagatgccaatatggctgtcttcaaaacggcaacgcttaatttgaatacgcgcactttcggcatcgatagcggcgatgtccacgcggaaaatatcgtgctgaaaccgttgtcgtgcgaatttgatttggtgtgcggcgacgaacgcgccgccgtggtgctgcctgttcccggccgccacaatgtccacaacgccgccgctgccgccgcgctgtctttggctgcaggtttgagtttgaacgatgtggcggaaggtttgaaaggcttcagcaatatcaaaggccgtctgaacgtcaaagccggcatcaagggcgcgaccctgattgacgatacttataatgcgaacccggacagcatgaaagccgcgattgacgtgttggcgcgtatgcctgcgccgcgtattttcgtaatgggcgatatgggcgaactgggcgaggacgaagccgccgctatgcacgccgaagtcggtgcgtatgcccgcgaccaaggcatcgaagcggcttattttgtcggcgacaacagcgtcgaagcggcggaaaaatttggcgcggacggtttgtggtttgccgccaaagacccgttgattcaagtgttgcgccacgatttgcccgaacgcgccaccgtgttggtgaaaggttcgcgctttatgcagatggaagaagtggtcgaggcattggaggataagtga

SEQ ID NO: 70678 - DNA, 1248 bp, Neisseria meningitidis; identical to SEQ ID NO: 36316

SEQ ID NO: 70679 - DNA, 360 bp, Neisseria meningitidis; identical to SEQ ID NO: 45472

SEQ ID NO: 70680 - DNA, 876 bp, Neisseria meningitidis; identical to SEQ ID NO: 55975

SEQ ID NO: 70681 - DNA, 462 bp, Neisseria meningitidis; identical to SEQ ID NO: 61409

SEQ ID NO: 70682 - DNA, 900 bp, Neisseria meningitidis; identical to SEQ ID NO: 54796

SEQ ID NO: 70683 - DNA, 717 bp, Neisseria meningitidis
gtgttcaataatttccttgcttcgctgccgtttatgacggaaacacgcgccgatatgattgtcagcgcgtttttgcctatggtcaaagccggcttcgcggtctctctgcctttggcggcagcttctttcgttatcggtatgatgattgcggtagccgtggctttggtgcggattatgcccgccggcggcatcgtgcggaaaatcctgctgaaattggtggaattttatatttccgtcattcgcggtacgccgctgttggtgcagcttgtgattgtgttttacgggctgccgtccgtcggtatctatatcgatccgattcccgccgccattatcggcttctcgctcaatgtcggtgcatacgcttccgaaaccatacgcgcggcaattttgtccgtacctaaaggccaatgggaagcaggtttctccatcggtatgacctatatgcagacgttccgccgcatcgtcgcgccgcaggcattccgcgttgccgtgccgcctttgagcaacgagtttatcggcttgttcaaaaacacctcgctcgcagcggtggtaacggtaactgaattgttccgcgtcgcgcaggaaacggcaaaccgcacttacgactttttgcccgtctatatcgaagccgcattggtttactggtgtttctgcaaggttctgttcctgattcaggcacgtttggaaaaacgtttcgaccgttatgtcgccaaataa

SEQ ID NO: 70684 - DNA, 786 bp, Neisseria meningitidis
atggcggttttcatccctgcatcggcaggcgcggcggatttgatgttggcgcaggaatacaaagaccaagagattgcaggctgggcaatgagcgagaaactcgacggcgtgcgcgcctattgggacggaaagcacctgataagccgtcagggctacgcgtttacgccccccaaaggctttaccgcgcagtttccgccttatcctttggacggcgaattgtatagcggacgcggtcagttcgagcagatttccgctaccgtgcgttctgtttcttcagactggcgcggcatccgtctgcacgttttcgacgtacccaaggcgcagggcaatctctaccaacgtttggcagtcgcaacgcagtggctgaaaacgcatccgaacgcgccgattaccatcatcccgcaaatcaaagtgcgcgaccggcagcacgcaatggactttttaaaacaaatcgaagcgcagggcggcgaaggcgtgatgctgcgtcagcccgaatcccgttacagcggcggcaggagcagccaattattgaagctgaaaagccaatacgacgacgaatgcacggtaacgcggcactatgagggcaaagggcgaaacgccggacggctgggcgcggtcggctgcaaaaaccggtacggcgaattccgcattggcagcggcttcaaagataaagaccgagacaacccgcccaaaatcggcacactgattacctaccgctaccgtggctttacgcagaaaggcacgccgaaattcgccacgtttgtgcgcgtgcgtaccgaccgctga

SEQ ID NO: 70685 - DNA, 360 bp, Neisseria meningitidis; identical to SEQ ID NO: 54420

SEQ ID NO: 70686 - DNA, 657 bp, Neisseria meningitidis; identical to SEQ ID NO: 55760

SEQ ID NO: 70687 - DNA, 1431 bp, Neisseria meningitidis
atgacctgggaaaccgtaatcggcttggaaatccacgtccaattgaacaccaaatccaaaatcttcagcggcgcatcgaccgcattcggcgcagaacccaacgcgcacgccggcgtagtggaatgtgctttgccgggcgtactgccggtaatgaaccgagaagtcgttgaaaaagccatcaaattaggcttggctttggatgcgaaaatcaaccggaaaaacgtgttcgaccgtaaaaactacttctatcccgacttaccaaaaggctatcaaatcagccagttggacttaccgattgtcgaacacggcaaattggaaatcgtagtcggcgacgatgtgaaaaccatcaacgtaacccgcgcccatatggaagaagacgcgggcaagtccgtacatgaaggcttgaacggcgcgaccggtatcgatttgaaccgcgccggcacgcctttattggaagtcgtatccgaacccgaaatgcgctccgccgccgaagccgttgcctacgccaaagccttgcacagcttggtaacctggctgaacatttgcgacggcaatatggcggaaggttcgttccgcgtcgatgccaacgtatccgttcgcccgaaaggtcaagcggaattcggcacgcgccgcgagattaaaaacctcaattccttccgtttcttggagcaggcgattaattacgaagcagaagcgcaaatcgagattttggaagacggcggcaaagtacagcaggcaacgatgctgtttgatcccgaaaaaggcgaaacccgcgtaatgcgcctgaaagaagacgcgcaagactaccgctacttccccgaccccgatttgctgcccgtcatcatttcagatgcccaaatgcaaaaagccaaagcagaaatgcccgagctgccgaaagaaatggcagcgcgtttcgtggcggactacggcgtgtccgaatacgacgcgcgcctgctcaccgcaagccgcgcacaggccgcctattttgaagaagccgccaaagagagcggacaaggcaagccgactgccaactggatgaacggcgaactcgccgccgcactgaacaaagaaggcatggaacttgccgacagcccgattaccgctccgcgcctcgccgcgctggtaggcaaaatcgccgacggcacattaagcagcaaattagcgaaaaaagcctttgaagccatgtgggcagaatccgaagccaccattgccgaaatcattgaaaaacacggtttgcagcaaatgaccgataccggcgcgattgaagccatggtggacgaagtgctggcaaacaacgccaaagccgtggaacagttcaaatccggcaacgaaaaagccctgaatgcgattgtgggacaagtgatgaaggccagcaaaggcaaagccaaccccgcgcaggttcaagagctgattaaagccaaacttgcctga

SEQ ID NO: 70688 - DNA, 1455 bp, Neisseria meningitidis
atgactacgcaaaccatcaaatttcacatgaagccggaaactttcaagcaaaacgccgcaatttcccttcaagacaagcctttgcgtaaaagcctgcgtaccgcgatggatatgctgatgaccaaacgcaaagctgttttgaccgacgaagaagagctgcaaagcttgcgcgatttgtgcgaacacgtccgtcagcgctcattgtctaaattgcctgccctgctggagcagctggaagaaaacctgaccaagttgggcgtaaaagtacactgggcggaaacaccggccgaagcctgcgaaatcatccacgacatcatcacagccaaaaacggcaagctgatggtcaaaggcaaatcgatggtcagcgaggaaatcgagctgaaccattatcttgaagcaaaaggcattaaagcggtggaaagcgacttgggcgagttcatcgtccaaatggcaggtgaaaaaccgacccatatcgtgatgcctgctatccacaaaaccaaagaacaggttagcgaactgttccaccaaaacctcggtacgccgctgacagacgatgtagaccaactgaccggcttcgcccgtaaagcactgcgcgatatttacagcactgccgatgtcggtttgagtggcgtaaactttgccgttgctgaaacaggtacgctgtgtctggtggaaaacgagggcaacggtcgcttgagtaccaccgtaccgcccgtgcatatcgctattaccggcattgaaaaagtggtggcgaaattgtccgacatcccacccttgtacagtctgctgccgcgctccgccatcggtcaaaacatcacaacctatttcaatatgattaccggcccgcgccgcagtgaagaattagacggtccgcaagaaatgcacttggttctgctcgacaacggccgcagccaagcttacgcagaagatcaaatgcgccgcaccttgcaatgtatccgttgcggtgcgtgtatgaaccactgtccggtttatacccgtatcggtggtgcggcttacggtacgacttatcccggcccgattggcgagattatctctccgcatttgttgggcttggatgcgacacgcgatctgccgactgcgtgtactatgtgtggcgcgtgcgttgaagtttgtccggtacgcattccgattaccgaacaaatgcagcgtttgcgcgttgaagcgcaacgttcgccgaccgaaaccgtgccgcaccccatccgggggcaaggcgcatcgcataccttcggcgaacaaatggcgtggcgcacattcaacggtattttcagcggcagcaaaacctaccgcgccttcggttgggcagccaccaagttccgcaacctgaccccgcgcaaacagttgggttggacgcaaaaccgcgtgccgatgaaaccggcgaagaaaaccctgcacgaactgatggcagaaaaaatgcgccaaaaagaacaggcataa

SEQ ID NO: 70689 - DNA, 621 bp, Neisseria meningitidis; identical to SEQ ID NO: 54208

SEQ ID NO: 70690 - DNA, 126 bp, Neisseria meningitidis
atggtctatttgggaaaaaacaatgttttcaaggaagatgatactcaagtcctgccaaaaacagcaaaaatgccgtctgaacagttcagacggcatttccaaaaccgttttacgcttgaacgttga

SEQ ID NO: 70691 - DNA, 2187 bp, Neisseria meningitidis
gtgggcttggaaacggttaccgtcgtcggcaaaagccgtccgcgcgccacatccgggctgctgcacacttcgaccgcctccgacaaaatcatcagcggcgacaccttgcgacaaaaagccgtcaacttgggcgatgctttggacggcgtgccgggcattcacgcctcgcaatacggcggcggcgcgtccgctcccgttattcgcggtcaaacaggcaggcggattaaagtgttgaaccatcacggcgaaacaggcgatatggcggatttttcgcccgatcacgccattatggtagataccgccttgtcgcaacaggtcgaaatcctgcgcgggccggttacgctcttgtacagctcgggcaatgtggcggggctggtcgatgttgccgatggcaaaatccccgaaaaaatgcctgaaaacggcgtatcgggcgaactcggattgcgtttgagcagcggcaatctggaaaaactcacgtccggcggcatcaatatcggtttgggcaaaaactttgtattgcacacggaagggctgtaccgcaaatcgggggattacgccgtaccgcgttaccgcaatctgaaacgcctgcccgacagccacgccgattcgcaaacgggcagcatcgggctgtcttgggttggcgaaaaaggttttatcggcgtagcgtacagcgaccgtcgcgaccaatatggtctgcctgcccacagccacgaatacgatgattgccacgccgacatcatctggcaaaagagcttgattaacaaacgctatttacagctttatccgcacctgttgaccgaagaagacatcgattacgacaatccgggcttgagctgcggcttccacgacgacgataatgcacacgcacacacccacagcggcagaccgtggatagacctgcgcaacaaacgctacgaactccgtgccgaatggaagcaaccgttccccggttttgaagccctgcgcgtatacttgaaccgcaacgactaccgccacgacgaaaaagcaggcgatgcagtggaaaacttcttcaaaaacaaaacgcaaaacgcccgcatcgagttgcgccaccaacccataggccgtctgaaaggcagctggggcgtgcaatatttacaacaaaaatccagtgctttatctgccacatccgaagcggtcaaacaaccgatgttgattgacaacaatgtgcgccattacagctttttcggtgtagaacaggcaaactgggacaacttcacgcttgaaggcggcgtacgcgtggaaaaacaaaaagcctccatccggtacgacaaagcattgattgatcgggaaaactactacaaccaccccctgcccgacctcggcgcgcaccgccaaaccgcccgctcgttcgcactttcgggcaactggtatttcacgccgcaacacaaactcagcctgaccgcctcccatcaggaacgcctgccgtcaacgcaagagctgtacgcacacggcaaacacgttgccaccaacacttttgaagtcggcaacaaacacctgaacaaagagcgttccaacaacatcgaactcgcgttgggctacgaaggcgaccgctggcaatacaatctggcactctaccgcaaccgcttcggcaactacatttacgcccaaaccttaaacgatggacgcggccccaaatccatcgaagacgacagcgaaatgaagctcgtgcgctacaaccaatccggtgcggacttctacggagcggaaggcgaaatctacttcaaaccgacaccgcgctaccgcatcggcgtttccggcgactatgtacgaggccgtctgaaaaacctgccatccctacccggcagagaagatgcctacggcaaccgtcctttcatcgcacaggacgaccaaaatgccccccgtgttccggctgcgcgcctcggcttccacctgaaagcctcgctgaccgaccgtatcgatgccaatttggactactaccgcgtgttcgcccaaaacaaactcgcccgctacgaaacgcgcacgcccggacaccatatgctcaacctcggcgcaaactaccgccgcaatacgcgctatggcgagtggaattggtacgtcaaagccgacaacctgctcaaccaatccgtttacgcccacagcagcttcctctctgatacgccgcaaatgggccgcagctttaccggcggcgtgaacgtgaagttttaa

SEQ ID NO: 70692 - DNA, 564 bp, Neisseria meningitidis
atgaaaaaaatcatcttcgccgcactcgcagccgccgccatcagtactgcctccgccgccacctacaaagtggacgaatatcacgccaacgcccgtttcgccatcgaccatttcaacaccagcaccaacgtcggcggtttttacggtctgaccggttccgtcgagttcgaccaagcaaaacgcgacggtaaaatcgacatcaccatccccattgccaacctgcaaagcggttcgcaacactttaccgaccacctgaaatcagccgacatcttcgatgccgcccaatatccggacatccgctttgtttccaccaaattcaacttcaacggcaaaaaactggtttccgttgacggcaacctgaccatgcacggcaaaaccgcccccgtcaaactcaaagccgaaaaattcaactgctaccaaagcccgatggcgaaaaccgaagtttgcggcggcgacttcagcaccaccatcgaccgcaccaaatggggcgtggactacctcgttaacgttggtatgaccaaaagcgtccgcatcgacatccaaatcgaggcagccaaacaataa

SEQ ID NO: 70693 - DNA, 4392 bp, Neisseria meningitidis
atgaaaacaaccgacaaacggacaaccgaaacacaccgcaaagccccgaaaaccggccgcatccgcttctcgcctgcttacttagccatatgcctgtcgttcggcattcttccccaagcctgggcgggacacacttatttcggcatcaactaccaatactatcgcgactttgccgaaaataaaggcaagtttgcagtcggggcgaaagatattgaggtttacaacaaaaaaggggagttggtcggcaaatcaatgacaaaagccccgatgattgatttttctgtggtgtcgcgtaacggcgtggcggcattggtgggcgatcaatatattgtgagcgtggcacataacggcggttataacaatgttgattttggtgcggagggaagcaatcccgatcagcaccgtttttcttaccaaattgtgaaaagaaataattataaagcagggactaaaggccatccttatggcggcgattatcatatgccgcgtttgcataaatttgtcacagatgcagaacctgttgagatgaccagttatatggatgggtggaaatataccgatcaaaataattatcctgaccgtgttcgaatcggagcaggcagacaatattggcggtctgatgaagatgaacccaataaccgcgaaagttcatatcatattgcaagtgcgtattcttggctcgttggtggcaatacctttgcacaaaatggatcaggtggtggcacagtcaacttaggtagtgaaaaaattaaacatagcccatatggttttttaccaacaggaggctcatttggcgacagtggctcaccaatgtttatctatgatgcccaaaagcaaaagtggttaattaatggggtattgcaaacaggcaacccctatataggaaaaagcaatggcttccagctagtgcgtaaaaattggttttatgacgaaatttttaccggagatacccattcagtattctacgaaccacatcaaaatgggaaatacacttttcacgacaataataatggcacaggaaaaatcaatgccaaacatgaacacaattctctgcctaatagattaaaaacacgaaccgttcaattgtttaatgtttctttatccgagacagcaagagaacctgtttatcatgctgcaggtggtgtcaacagttatcgacccagactgaataatggagaaaatatttcctttattgacgaagggaaaggcgaattgatacttaccagtaacatcaaccaaggtgctggaggattatatttccaaggagattttacggtctcgcctgaaaacaacgaaacgtggcaaggtgcgggcgttcatatcagtgaagacagtaccgttacttggaaagtaaacggcgtggcaaacgaccgcctgtccaaaatcggcaaaggcacgctgcacgttcaagccaaaggggaaaaccaaggctcgatcagcgtgggcgacggtacagtcattttggatcagcaggcagacgataaaggcaaaaaacaagcctttagtgaaatcggcttggtcagcggcaggggtacggtgcaactgaatgccgataatcagttcaaccccgacaaactctatttcggctttcgcggcggacgtttggatttaaacaggcattcgctttcgttccaccgtattcaaaataccgatgaaggggcgatgattgtcaatcataatgccacaacaacatccaccgttaccattacagggaatgaaagtattacacaaccgagtggtaagaatatcaatagacttaattacagcaaagaaattgcctacaacggttggtttggcgagaaagatgcgaccaaaacgaatgggcggctcaaccttgtttaccagcccgccgcagaagaccgcaccctgctgctttccggcggaacaaatttaaacggtaacatcacgcaaacaaacggcaaactgtttttcagcggcagaccaacaccgcacgcctacaatcatttaaacaaccattggtcgcaaaaagagggcattccgcacggagaaatcgtgtgggacaacgactggattaaccgcacgtttaaagcggaaaatttccatattcagggcgggcaggcggtgatttcccgcaatgttgccaaagtggaaggcgattggcatttgagcaatcacgcccaagcagttttcggtgtcgcaccgcatcaaagccacacaatctgtacacgttcggactggacgggtctgacaaattgtgtcgaaaacaccattaccgacgataaagtgattgcttcattgaccaataccgacatcagcggcaatgtcgatcttgccgatcacgctcatttaaatctcacagggcttgccacgctcaacggcaatctgaccgcaggcggagacacgcactatgaggttacgcacaacgccacccaaagaggcaaccttagcctcgtgggcaatgcccaagcaacatttaatcaagccacattaaacggaaacacatcggcttcgggcaatgcttcatttaatctaagcaacaacgccgtacaaaacggcagtctgacgctttccggcaacgctaaggcaaacgtaagccattccgcactcaacggcaatgtctccctagccgataaggcagtattccattttgaaaacagccgccttaccggacaaatcagcggcggcaaggatacggcattacacttaaaagacagcgaatggacgctgccgtcaggcacggaattaggcaatttaaaccttgacaacgccaccattacactcaattccgcctatcgccacgatgctgcaggcgcgcaaaccggcagtgtgtcagacacgccgcgccgccgttcgcgccgttcgcgccgttccctattatccgttacaccgccaacttcggcagaatcccgtttcaacacgctgacggtaaacggcaaattgaacggtcagggaacattccgctttatgtcggaactcttcggctaccgcagcgacaaattgaagctggcggaaagttccgaaggcacttacaccttggcggtcaacaataccggcaacgaacctgcaagcctcgaacaattgacggtagtggaaggaaaagacaacaaaccgctgtccgaaaaccttaatttcaccctgcaaaacgaacacgtcgatgccggcgcgtggcgttaccaactcatccgcaaagacggcgagttccgcctgcataatccggtcaaagaacaagagctttccgacaaactcggcaaggcagaagccaaaaaacaggcgggaaaagacaacgcgcaaagccttgacgcgctgattgcggccgggcgcgatgccgtcgaaaagacagaaagcgttgccgaaccggcccggcaggcaggcggggaaaatgtcggcattatgcaggcggaggaagagaaaaaacgggtgcaggcggataaagacagcgccttggcgaaacagcgcgaagcggaaacccggccggctaccaccgccttcccccgcgcccgccgcgcccgccgggatttgccgcaaccgcaaccccaaccgcaaccccaaccgcagccccaaccgcagcgcgacctgatcagccgttatgccaatagcggtttgagtgaattttccgccacgctcaacagcgttttcgccgtacaagacgaattagaccgcgtatttgccgaagaccgccgcaacgccgtttggacaagcggcatccgggacaccaaacactaccgttcgcaagatttccgcgcctaccgccaacaaaccgacctgcgccaaatcggtatgcagaaaaacctcggcagcgggcgcgtcggcatcctgttttcgcacaaccggaccgaaaacaccttcgacgacggcatcggcaactcggcacggcttgcccacggcgccgttttcgggcaatacggcatcgacaggttctacatcggcatcagcgcgggcgcgggttttagcagcggcagcctttcagacggcatcggaggcaaaatccgccgccgcgtgctgcattacggcattcaggcacgataccgcgccggtttcggcggattcggcatcgaaccgcacatcggcgcaacgcgctatttcgtccaaaaagcggattaccgctacgaaaacgtcaatatcgccacccccggccttgcgttcaaccgctaccgcgcgggcattaaggcagattattcattcaaaccggcgcaacacatttccatcacgccttatttgagcctgtcctataccgatgccgcttcgggcaaagtccgaacgcgtgtcaataccgccgtattggctcaggatttcggcaaaacccgcagtgcggaatggggcgtaaacgccgaaatcaaaggtttcacgctgtccctccacgctgccgccgccaaaggcccgcaactggaagcgcaacacagcgcgggcatcaaattaggctaccgctggtaa

SEQ ID NO: 70694 - DNA, 450 bp, Neisseria meningitidis
atgagtatttatgccgtcgcgcacatcgtccatctgtattgcgccatcgcctttgtcggcggcgtgttttttgaagtgctggttttgtccgtcctgcatacgggacgggtgtcgtgcgaggcgcggcgcaaagtggaaaaggccatgtcttaccgcgccgtcagggtgatgccgtttgtggtcggactgctgttcgccagcggcgtcgtgatggcggcaaaccgctatctttctatattgggcgaaccgtttgccacttccttcggtacgatgctgacgctgaaaatcctgttggcgttcagcgtgttggcgcacttcgccatcgccgtcgtcaaaatggcgcgttccacactgacggtcggctggtcgaaatacatacacgccgtcgtctttacccatatgctgctgattgtctttttggcaaaagcgatgttttatatcagctggtaa

SEQ ID NO: 70695 - DNA, 633 bp, Neisseria meningitidis
atgacggtatgggtcggactgaccggcggaatcggcagcggcaaatcggcagccgcgcaatgttttgccgatttgggcgtgccgcgcatcgatgcagacgcggcggcgcactcgctgacggcttcagacggcatcgccctgccggaaatcaggcggctgttcggcgacaccgttttcgacacacagggtttgttgcggcgcgacatattgcgtaaagaagtctttgcctccccatcgcgaaaagccttgctcgaatccgtgatgttgccgctgattttctcagaaatcaaaaaacagcaagaaacctttaccgatgcggcttacggcattgtcgaaattccgctgctgacggaaaagcgtcaatttatcagcctgatacggcgtgtcctgaccataagcgcacctttggaaaaacgtatcggcagggtgatggcccgcagcgggctgacgcgcggcgaagtggcggacatcatcagccatcaggcatccgaatccgaacgcctgctgcttgcagacgatgtgctgctcaatgacggcagcctcaaaaacctacgtgagaaaacaatgcgcctgcacgcgttttattcagggattttcgcctcaaaaccaacacaaggaaaacacaatggctga

SEQ ID NO: 70696 - DNA, 873 bp, Neisseria meningitidis
atgagctggttagataaaatcctgccacccaaaatcaaaaaccgcagcaaagacggttcttccaatgttcccgagggtttgtggcacaaatgtccgtcttgttcggcaaccgtttattcgaccgagttgcagcagaacaatcaggtttgtccgaaatgcaaccaccacaatccgttgtcggcacgacaacgcctgaatctgcttttggatgaggatggcagagaggaggttgccggaaatgtcaaaccgacagatcctttgaagtttaaagacggcaaaaaatatccggatcgtttgagtgcggcacgcaagctgaccggggaagatgatgctttggtggtaatgaaaggcaagatgaacggtctgcccgttgtggttgctgcgtttgagttccgctttatcggcggttcgatgggttcggttgtgggcgaacgattcgtacaaggtatccgtcgggcggttgccgacaattgtccgttcgtctgtgtggcggcttccggcggtgcgcgtatgcaggagggtgtgaactcgttgatgcagatgacgaaaaccagtgccgcgctgcatttgctgacggaaaaacgcctgccgtttatatcggtattgaccgatccgactatgggcggcgtatccgccagcttcgcatttttgggcgatgtcgtgcttgccgaacccaatgcattaatcggctttgccggtccgcgcgtgattgagcagacggtgcgcgaaacgctgccggaaggcttccagcgtgccgagtttttgctggaaaaaggcgcaatcgaccagattgtcgaccggcgcgagatgaagcagagaatcagcggtttgattacgctgttgtgccgtcaggacaaagtttctgccgcctga

SEQ ID NO: 70697 - DNA, 1539 bp, Neisseria meningitidis
atgaatatgctgggagctttggcaaaagtcggcagcctgacgatggtgtcgcgcgttttgggatttgtgcgcgatacggtcattgcgcgcgcattcggcgcgggcatggcgacggatgcgttttttgtcgcgttcaaactgcccaacctgcttcgccgcgtgtttgcggagggggcgtttgcccaagcgtttgtgccgattttggcggaatataaggaaacgcgttctaaagaggcgacggaggcttttatccgccatgtggcggggatgctgtcgtttgtgctggtcatcgttaccgcgctgggcatacttgctgcgccttgggtgatttatgtttccgcacccggttttgccaaagatgccgacaaatttcagctctccatcgatttgctgcggattacgtttccttatatcttattgatttcactttcctcttttgtcggctcggtactcaattcttatcataagttcggcattccggcgtttacgcccacgttcctgaacgtgtcgtttatcgtattcgcgctgtttttcgtgccgtatttcgatcctcccgttaccgcgctggcttgggcggtctttgtcggcggcattttgcagctcggcttccaactgccctggctggcgaaactgggttttttgaaactgcccaaactgagtttcaaagatgcggcggtcaaccgcgtgatgaaacagatggcgcctgcgattttgggcgtgagcgtggcgcagatttctttggtgatcaacacgattttcgcgtcttatctgcaatcgggcagcgtttcatggatgtattacgccgaccgcatgatggaactgcccggcggcgtgctgggggcggcactcggtacgattttgctgccgactttgtccaaacactcggcaaaccaagatacggaacagttttccgccctgctcgactggggtttgcgcctgtgtatgctgctgacgctgccggcggcggtcggactggcggtgttgtcgttcccgctggtggcgacgctgtttatgtaccgcgaattcacgctgtttgacgcgcagatgacgcaacacgcgctgattgcctattctttcggtttaatcggtttgatcatgattaaagtgttggcacccggcttctatgcgcggcaaaacatcaaaacgcccgtcaaaatcgccatcttcacgctcatctgcacgcagttgatgaaccttgcctttatcggcccactgaaacacgtcggactttcgcttgccatcggtctgggcgcgtgtatcaatgccggattgttgttttacctgttgcgcagacacggtatttaccaacctggcaagggttgggcggcgttcttagcaaaaatgctgctctcgctcgccgtgatgggaggcggcctgtatgccgcccaaatctggctgccgttcgactgggcacacgccggtggaatgcaaaaggccgcccggctcttcatcctgattgccgtcggcggcggactgtatttcgcatctctggcggctttgggcttccgtccgcgccatttcaaacgggtggaaagctga

SEQ ID NO: 70698 - DNA, 900 bp, Neisseria meningitidis; identical to SEQ ID NO: 43336

SEQ ID NO: 70699 - DNA, 171 bp, Neisseria meningitidis
gtgaaaaaagtattgaaagcagtcgaagcaggcgataaagctgccgcacaagcggtttaccaagagtccgtcaaagtcatcgaccgcatcgccgacaagggcgtgttccacaaaaacaaagcggcacgccacaaaagccgtctgtctgcaaaagtaaaagcactggcttga

SEQ ID NO: 70700 - DNA, 774 bp, Neisseria meningitidis; identical to SEQ ID NO: 47967

SEQ ID NO: 70701 - DNA, 435 bp, Neisseria meningitidis; identical to SEQ ID NO: 55248

SEQ ID NO: 70702 - DNA, 774 bp, Neisseria meningitidis; identical to SEQ ID NO: 54222

SEQ ID NO: 70703 - DNA, 876 bp, Neisseria meningitidis; identical to SEQ ID NO: 40452

SEQ ID NO: 70704 - DNA, 231 bp, Neisseria meningitidis
atgaacatcgttaaaaaatatgctgtaaaagcattgttggcagctggtatcttcacaccggctattgttatggcagatacctttgatgcatccgcgattggtacgcaagtagcgaatgtaatcatgggtttcgtgtcaatggtttccgccgtgggtatggcggccattaccgtcattttggcaatccaaggcttcaaaatggcttggagcatgattaaatctgtcaaataa

SEQ ID NO: 70705 - DNA, 627 bp, Neisseria meningitidis; identical to SEQ ID NO: 41045

SEQ ID NO: 70706 - DNA, 1155 bp, Neisseria meningitidis; identical to SEQ ID NO: 45755

SEQ ID NO: 70707 - DNA, 918 bp, Neisseria meningitidis
atggaaaaagcagaacatttgaacagcagccggttcgtcaatctggtcaaaagcggcggcggcagctatgtggagggcagctaccgtttcgatactttgtccaacggcatttccatccacggcggcacggtaacggcacggtgcgatttttgcagcagccgcctcgccgaaccttatgtgtcgttcgtgctcttgctggaaggcagtttggacttcggcatcaaccgccgccgcttccaaatcgatgcggatggcggcaagatcgtcctaattgctgtcggggaagaggtcctgttcagccgctatctttaccgaggcggcaaaacggtcaaaatgaccattaaaggtatggaacaatggctgctgcgtccggagtatgcgcgtttcgcacccctgctttaccgcgaaccggtcagaatatggaatttgtccccaaacctgcgcggcttggcggcatcctgcctgaaagctgtcccaaaggggcatttgggcgaaacattgcgccgcgaggcggacgttttgcggctgctgtcggacttgtgggacacggtttcagacggcatcgggccggcggcggggcaaacggcggaagcagacgctatgccgtctgaagacttcaaccgcaccctaaatgccgcgtttgccgacggcgcacaccaagtcaaccggctgacagacgcgctgaacatcagtgaaaggacgctgcaacgccgtatgcgcgaccatttcggtattaccgcaagcgagtggctgcaccacaaacaaatgcagcacgcgctctacctgttgcaaaacgggggcaaaagcataggcgaaaccgcgtatttgtgcggctaccgccacgtttccagctttactcaggcattcaggcaatatttcggcagcacgcctgcggaaaccaaaaaagaaaaccggtaa

SEQ ID NO: 70708 - DNA, 540 bp, Neisseria meningitidis; identical to SEQ ID NO: 55002

SEQ ID NO: 70709 - DNA, 1065 bp, Neisseria meningitidis
atgactcttttaaaaaacgataccttcctccgcgccctgcttaaacagcccgtcgaatacacgccgatttggatgatgcgtcaggcggggcgttatctgcccgaatataaagccacacgcgcgaaagcgggcagcttcctcgatttgtgcaaaaacaccgaattggcgaccgaagttaccatccaacctttggaacgtttcgatttggacgcggcgattttgttttccgacatcctgaccgtccctgacgcaatgggcttgggactgtattttgccgaaggcgaaggcccgaaattcaaacgcgccctgcaacacgaggatgacattgccaaattgcacgtccccgatatggaaaaactgcaatacgtctttgatgccgtcagctccatccgtaaagcactggacggccgcgtaccgcttatcggcttctccggcagcccgttcacacttgcctgctacatggttgaaggtggcagcagcaaagaattccgcaccatcaaaaccatgatgtactcgcgccccgatttgctgcacaaaatcctcgataccaatgctcaagccgttaccgcctatctcaacgcccaaatcgacgcgggcgcgcaggctgtgcagattttcgacacttggggcggcgtcttgagcgatgaggcgtttaaagaattcagcctcaaatacatccgccagatcgtcgccggactcaaacgcgaaagcgaaggcagacgcgtgcctgttatcgtatttgccaaaggcggcgggctgtggctggaaagcatggcagaaattggcgcagacgcattgggcttggactggacgtgcaacataggcgaagcacgccgccgcgtcggcaagcaagtcgccctgcaaggcaacttcgacccgttcgccctcttcggtacgccggaatccatccgcaccgaggtcgcacgcatcctagccgactacggacaaggcagcggccatgtcttcaacctcggacacggcatcaaccaacacgccgaccccgaacacgccaaaatcttagtcgacaccgtacacgagctgtcgcggcagtatcacggcgggtaa

SEQ ID NO: 70710 - DNA, 621 bp, Neisseria meningitidis; identical to SEQ ID NO: 55589

SEQ ID NO: 70711 - DNA, 780 bp, Neisseria meningitidis; identical to SEQ ID NO: 55964

SEQ ID NO: 70712 - DNA, 402 bp, Neisseria meningitidis; identical to SEQ ID NO: 38334

SEQ ID NO: 70713 - DNA, 1473 bp, Neisseria meningitidis; identical to SEQ ID NO: 54513

SEQ ID NO: 70714 - DNA, 309 bp, Neisseria meningitidis; identical to SEQ ID NO: 55721

SEQ ID NO: 70715 - DNA, 738 bp, Neisseria meningitidis
atgggcggacagaaaacgcatttcgggttcagcacggtcaacgaagatgagaaagccggaaaagtggcggaagtgttccactccgtcgccaaaaactacgacattatgaacgatgtcatgtcggcagggctgcacagggtgtggaagcatttcaccatcaacacggcacacctgaaaaaaggcgataaagtgttggacattgcgggcggtacgggcgatttgtcccgagggtgggcgaaacgcgtcggcaaggaaggcgaggtttggctgaccgatattaattcttctatgctgaccgtcgggcgcgaccgtctgttgaacgaaggcatgattttgcccgtgtcgcttgccgatgcggaaaaactgcctttccccgacaattatttcaacttggtttccgtggcgttcggcttgcggaacatgacgcataaagatgccgcgctgaaagagatgtaccgtgttttgaaaccgggcggcacgttgctggtgttggagttttccaaaatctacaaacctttggaaggcgcgtatgatttctattcgttcaagctgctgccggtcatgggcaggctgattgccaaagatgcggagagttatcaatatcttgccgaatccatccgtatgcaccccgatcaggaaactttgaaacagatgatgttggatgcgggctttgacagcgtggattatcacaatatgagtgcgggcatcgtcgcgctgcataagggcgtgaaattttaa

SEQ ID NO: 70716 - DNA, 819 bp, Neisseria meningitidis
atgaaaggtatggataaattgagataccaacaggattttttaaatatccgccccatttttacagccggcgaacaagaatacctgaccggattgtccgatcggcttcctttatctgttttaacggactccgtgcgtaatattgaagaaatcggtatcgattttgtgtacagttctgccaaattggaaggaaacacttataatcaatacgatacgcaggcattgcttaaactcgggcaaaccgcaggcgggaagttatattcggatgccgtaatgttaatcaacctgagggaaagttaccggcacctgctgtccggtttggacagccccgagccgtttgactggttggatttcttaaaaaccacccacagcctgatttccgaaaacttactggaaaaaggctccggcggcgtagtccgccgcgacagcgttaccataagcgggacagactacacccctttatctaacccgcaaagtttggatacggaattaaaatggttgcttcaagaagctcccaaaatagaaaatcctttcgaccgcgccgtttatctccataataatttggcgtatcttcaatattttaaagattgcaataaacgtactgccagaaactgcatgaccttgtcgctgatgcgctccggtttttttccttgcgtattctcccccgacagttatcccgcctatgccgaggctgtcgtagcctattacgaaaccggcgattacggtttattcaagaaatattttatttcggcatacgaaaataccgtaaataagtacggcccacagcctgatatggatatttcccgcaacttctccctttaa

SEQ ID NO: 70717 - DNA, 759 bp, Neisseria meningitidis; identical to SEQ ID NO: 39063

SEQ ID NO: 70718 - DNA, 1215 bp, Neisseria meningitidis; identical to SEQ ID NO: 36418

SEQ ID NO: 70719 - DNA, 552 bp, Neisseria meningitidis; identical to SEQ ID NO: 54731

SEQ ID NO: 70720 - DNA, 1134 bp, Neisseria meningitidis
atgtttaaaaaattcaaaccggtactgttgtcattttttgcacttgtatttgccttttggctggggacgggtattgcctatgagattaatccgcgttggtttttgagcgatacggcaactgaagtacctgaaaatccgaatgcttttgtggcgaaacttgcccgcctgttccgaaatgccgacagggcggttgtcatcgtgaaggaatcgatgaggacggaggaaagtcttgccgaaactgtggatgacggtccgttgcagtcggagaaggattatctcgcgctcgctatccggctcagtcgtttgaaagaaaaggcgaaatggtttcacgtaacggagcaggaacatgggaaagaggtttggctggattaccatatcggcgagggcggtttggttgcggtttcgctttcgcaacgctcgccggaagcgtttgttaatgccgaatatctgtatcggaacgatcgtccgttttctgtaaatgtgtacggcggaacggctcacggagaaaattatgaaacgacaggagaatatcgggttgtttggcaaccggacggttcggtatttgatgcgtcggggcgtgggaaaatcggggaagatgtttatgagcattgtctcgggtgttatcagatggcccaggtatatttggcgaaataccgggatgtcgcgaatgacgagcagaaggtttgggacttccgcgaagagagcaaccggattgcgtcggactcgcgcgattctgtgttttatcagaatatgcgggaattgatgccccgggggatgaaggcgaacagtcttgtggtcggctatgatgcggacggtctgccgcaaaaagtctattggagtttcgacaatggaaaaaaacgccagagtttcgaatattatttgaaaaacggaaatctttttattgcacaatcttcgacggtagcattgaaagcggatggcgtaacggcggatatgcagacctatcatgcgcaacagacgtggtatttggatggcgggcggattgtccgcgaagagaaacagggggacagactgcctgattttcctttgaacttggaagatttggaaaaagaggtgagccgttatgcagaggctgcagcgagacgttcgggcggcaggcgcgacctttctcactga

SEQ ID NO: 70721 - DNA, 1227 bp, Neisseria meningitidis; identical to SEQ ID NO: 38564

SEQ ID NO: 70722 - DNA, 528 bp, Neisseria meningitidis; identical to SEQ ID NO: 54496

SEQ ID NO: 70723 - DNA, 789 bp, Neisseria meningitidis; identical to SEQ ID NO: 55632

SEQ ID NO: 70724 - DNA, 489 bp, Neisseria meningitidis; identical to SEQ ID NO: 54926

SEQ ID NO: 70725 - DNA, 915 bp, Neisseria meningitidis; identical to SEQ ID NO: 55915

SEQ ID NO: 70726 - DNA, 270 bp, Neisseria meningitidis; identical to SEQ ID NO: 37651

SEQ ID NO: 70727 - DNA, 726 bp, Neisseria meningitidis
atgccccgattccacctgcccgaaaacctttccgtcggacaaaccgtcgccttgcccgacaacatcgtccgccacctcaacgtcctgcgcgtccgccccaacgaaaacatcaccctcttcgacggcaaaggcaaggcacacgccgcacggctgaccgttttggaaaaacgccgcgccgaagccgaaatcctgcacgaagacacaaccgacaacgagtccccgctcaacatcacactgatacaatccatctcctccggcgaacgtatggactttaccctgcaaaaaagcgtcgaactcggcgtaaccgccatacagcccgtcatcagcgaacgctgcatcgtccgcctcgacggggaacgcgccgccaaacgcctcgcacgctggcaggaaatcgtcatctccgcgtgcgaacaaagcggcaggaacaccgttccccccgtactgcccatcatcggctaccgtgaagcactcgacaaaatgccgtctgaaagcaccaagctgattatgagcatcaaccgcgcccgcaaactcggcgacatccgccaaccgtccggcgcaatcgtctttatggtcgggcctgaaggcggctggacagaacaggaagaacaacaggcatttgatgccggctttcaggcggttacactcggcaaacggattttacgcacagaaaccgccccactcgccgccctcgccgccatgcagacgctttggggcgatttcgcataa

SEQ ID NO: 70728 - DNA, 558 bp, Neisseria meningitidis
atggatgctttaaaattattgacgaaccgccgatcttccaaaaagctgaagccccccgcccccgatgcggcggagttggaacaaatatttcaggcggcaacccaagttcccgatcacggcaatatgcgccccttccgttttaccgtgattcaaggcgaggtaggattgcaacgttttcgcgatgtgttgaagcaaacggttgccgaattgaatttcggcgacgatgcgatgaaaaaggcggaaaaagtgggcaatatggcgccgatggttatcggggtaacgtttgcgccgaaccgcgatgtgcctaagccgaaaccggaatgggagcagatgctgacggcgggttgtgcggcgtatgcgctgcaactggcggcaacggcgcaaggtttcgacaatgtctggattacggggatgtgggtcaacagccccctgttgcgtgaggctttcggatgtgcggataaggataaaatcatcgggctgatgatggtcggcacgccgacagaggaagtgcataagcccaagaataccgatttggaagcgtttgtcagccattggtaa

SEQ ID NO: 70729 - DNA, 1302 bp, Neisseria meningitidis
atgccgtctgaacatcaacacacatcatcattgcttgatttcgaccgtacccatctgcttcatccctatacttccatgaccgatccgcttcccgtttatcctgtcaaacgtgcagaaggggtgtttatcgaattggcggacggcacacggctgattgacgggatgtcgtcttggtggtgtgcgatacatggttacaatcatcctgttttgaatcaggcggttgaggcgcagattaagcaaatgtcgcatgtaatgtttggcggtttgacgcacgatcctgcggtggaactgggcaagttgttggtcggaattttgccgcaggggctggaccgtattttttatgcggattcgggttcggtttcggtggaagtcgcgttgaaaatggcggtgcaataccagcaggcgcgggggttgacggcgaagcagaatattgcgacggtgcggcgcgggtatcacggcgatacttggaacgcgatgtccgtctgcgatccggaaacggggatgcaccatattttcggcagcgcgttgccgcagcgttattttgtcgataatccgaaaagccgtttcgacgatgaatgggacggggcggatttgcagcctgtccgcgccttgtttgaagtgcatcatgcggatattgccgcctttattttagagccggtcgtgcagggcgcgggcggcatgtatttttatcatccgcagtatcttcgcggattgcgcgatttgtgcgacgagtttgatatcgttttgatttttgatgaaatcgccaccggattcgggcgcacgggcaagatgtttgcctgcgaacacgcggaggtcgtgccggatattatgtgtatcggcaagggcttgagcggcggctatatgacgctggcggcagcaatcacttcgcaaaaagttaccgaaacgatttcgcgcggcgaagcgggcgtgtttatgcacggcccgacgtttatggcaaacccgctggcgtgtgccgttgcctgcgcttcggtcaaactgcttttgtctcaagactggcaggcaaatatccgccgcattgaaagcatcttaaaaggccgtctgaaagccgcgtgggacattcgcggcgtgaaagacgtacgcgttttgggtgccatcggcgtgatcgagctggataaaggcgtggatatggcgcgttttcaagcagattgcgtggcgcagggcatttgggtgcgcccgttcggcaggctggtgtatctgatgccgccgtatattatttcagacggcgttttgaccaaacttgccgacaaaaccgtgcaaatcttgaaggaacacagcaaatga

SEQ ID NO: 70730 - DNA, 666 bp, Neisseria meningitidis
atgacttttaccgcagtgctcttcgatctcgacggcgtcatcaccgacaccgccgaataccactaccgcgcatggaaaaaactcgctgaagaactgggcatcggcatcgaccgcaagtttaacgagcagcttaaaggcgtgtcgcgcgacgattcgctcaaacgcatcctcgcgcacggcggcaaaaccgtcggcgaagccgagtttgccgaactgacccgccacaaaaacgacaactacgtcgagatgattcaggcagtcaaacccgaagacgtgtatcccggcattttgcccctgctggaagcattgagggcaaacggcaaaaaaatcgcccttgcatccgccagtaaaaacggcccgttcctgctggaacgcatggggctgacccacttcttcgacgccattgccgaccctgccgccgtcgcacattccaaacccgcccccgacatcttcctcgccgcagccgagggcgtgggtgcggacatccgccgctgcatcggcatcgaagacgcagcggcaggagtagccgccatcaaagccgccggtgccttgcctgtcggcgtgggcaaagccgaagacttgggcagcgacatcgcgctggtgtccgacaccgccgggctgacctacgcctacctgcaaaacgtgtgggcacagtcgggcaggtaa

SEQ ID NO: 70731 - DNA, 360 bp, Neisseria meningitidis; identical to SEQ ID NO: 36598

SEQ ID NO: 70732 - DNA, 288 bp, Neisseria meningitidis; identical to SEQ ID NO: 39206

SEQ ID NO: 70733 - DNA, 1359 bp, Neisseria meningitidis; identical to SEQ ID NO: 37253

SEQ ID NO: 70734 - DNA, 468 bp, Neisseria meningitidis; identical to SEQ ID NO: 42615

SEQ ID NO: 70735 - DNA, 495 bp, Neisseria meningitidis
  misc_feature 476, 477, 478, 479, 480: 'n' is a, c, g or t
atggctaaaaacaaccaatacagcgaatccagcatcaccgtcctcaaaggcttggagccggtcaaagaacgtcccggcatgtacacccgcaccgacagcccgacccacatctgtcaggaagtgattgataatgcggcggacgaggcgttgggtggtttcgcgactgcaatcgacgtgcaaattcatgaagacggttcgctttccgtccgtgataacggccgcggtattcccgtcggcctgcaccctgaagaaggcgtacccgtagtcgaactcgtgttcacccgtctgcacgcgggcggcaagttcaacaaaaaagacggcggcagcgcgtatgccttttcaggcggactgcacggcgtgggcgtatccgtcaccaacgccctctccacccgccttgaggtaacggtcaaacgtgaaggcaaaatccaccgtatcgtgtttgccggcggcgacgtggtcgaaccgttggcacaagnnnnncacacacttaattaa

SEQ ID NO: 70736 - DNA, 171 bp, Neisseria meningitidis
  misc_feature 148, 149, 150, 151, 152: 'n' is a, c, g or t
atgagcgcatcacaattactgtcaagactgacccaaaccgtaggcgaaaaatacatcattaccgaccccgcgaaaaccgaacaataccgccaaggttaccgcttcggcgagggtaaggcgttggcggtggttcgccccggaagcattnnnnncacacacttaattaattaa

SEQ ID NO: 70737 - DNA, 618 bp, Neisseria meningitidis
atgagccacaaaaaacaagatgccttccaaggattgatcgacgcgctgaaggttttacccaacgtcgggccgaaatcggcacagcggatagcgtatcatttactccaacacaagcgcaaagaggctgaaaaactggtggatgccttgcagacggcattgaagcaggtcgatcattgcgcgatgtgcaacacgttttgcgaaggcggattgtgcgatatttgtgccgatgaaacacgcgacgggcggcggctgatggtggtgcatatgcctgccgacgtgtcgaatatggaagcggcaaactgccacgacgggctgtatttcgtcctgatggggcaaatcaatacggcactgggaatggacgtatccgccatcgcattggacaggctggcgcaacggctgggcggcggggaagtcgaagaaatcattattgcaaccgcttttaccgcagaaggcaatgcgacggcgtatgtcctgtccgagttttttaaaaacctgccttacaaagtcagcaggctgtcgcagggcatccccttgggcggcgaattggaatatgtcgatgcgggaacgctggcgcaggcggtgtacgaacgccgcctgattaaagaaggcggggcataa

SEQ ID NO: 70738 - DNA, 888 bp, Neisseria meningitidis
atgccctaccaacaaatcaccgtcaacgtcaacgatgccgtcgccgaacgcctcgccgacgcgctgatggaacacggcgcactctccgccgccatcgaagatgcctacgccggcacgcaaaacgaacaggcgattttcggcgaacccggtatgcccgccgaacaaatctggcagcagagcaaagtcatcgccctgttcggcgaacacgacgaagccgccgccatcatccaaaccgccgcacaagaatgcgggttaaaagacttggcatacaccggcgaaaccctcgaagaccaagactgggtacgcctgacccaagcgcaattcgaccccatccgaatttccgaacgcctgtggattaccccctcttggcacgaagcccccgaaggcactgccgtcaacctacgcctcgatcccggcctcgccttcggcaccggcagccacccgaccacgcgcctctgcctcaaatggctggatacgcaactcaaaaacggcgaaagcgtcctcgactacggctgcggttcgggcatcctgaccatcgccgccctcaaactcggcgcaggttctgccgtcggcgtggatattgacgaacaagccgtccgcgccggcaaggacaacgccgaacagaacaacgtcgatgcacaattcttcctgcccgacggtctgcctcaagggcaattcgacgtagttgtcgccaacatcctcgccaaccctttacgtatgctcggcgaaatgctcgccgcccgcaccaaacaaggcggccgcatcgtgttatccggtttgttggacgaacaagccgaagaactcggcggcatttacagccaatggttcgatctcgacccggcggaaaccgaagaaagctgggcgcgcttgagcgggacaaaacgctga

SEQ ID NO: 70739 - DNA, 1008 bp, Neisseria meningitidis
atgagcaccttcttccagcaaaccgcccaagccatgattgccaaacacatcgaccgtttcccgctattgaagttggatcaggtaattgattggcagccgatcgaacagtacctgaatcgtcaaaaaacccgttacctcagagaccaccgcggccgtcctgcctatcccctgttgtccatgttcaaagccgtcctgctcggacaatggcacagcctctccgatcccgaactcgaacacagcctcatcacccgcatcgatttcaacctgttttgccgttttgacgaactaagcatccccgattacagcaccttatgccgttaccgcaaccggctggcgcaagacgacaccctgtccgaattgctcaaactgattaaccgacaactgaccgaaaaaggcttaaaagtagagaaagcatccgccgccgtcattgacgccaccattattcagaccgccggcagcaaacagcgtcaggccatagaagttgacgaagaaggacaaatcagcggccaaaccacaccgagtaaggacagcgatgcccgttggatcaagaaaaacggcctctacaaactcggttacaaacaacatacccgtaccgatgcggaaggctatatcgagaaactgcacatcacccccgccaatgcccatgagtgcaaacacctgccgccgttgttagaagggatagctgaaggtacgaccgtctatgccgacaaaggctatgacagtgcggaaaaccggcaacatctggaagaacatcagttgcaggacggcattatgcgcaaagcctgccgcaaccgtccgctgacggaaacgcaaaccaaacgcaaccggtatttgtcgaagacccgttatgtggtcgaacaaagcttcggtacgctgcaccgtaaattccgctatgcgcgggcagcctatttcgggctgattaaagtgagtgcgcaaagccacctgaaggcgatgtgtttgaacctgttgaaagccgccaacaggctaagtgcgcctgttgccgcctaa

SEQ ID NO: 70740 - DNA, 891 bp, Neisseria meningitidis; identical to SEQ ID NO: 46844

SEQ ID NO: 70741 - DNA, 1911 bp, Neisseria meningitidis
atgaatatattatctgtagaaaacgcttcttttgccatcggccacgttgccttgctcgacaaaacttcttttcaactcgacagcggcgaaaaagtcggcttaatcggacgcaacggcgcaggcaagtcttcgtttttaaaaatcctcgccggtttgcaaaagctcgacgacgggcagattattgttcaaaacaacctcaaaatcgtttatgtaccgcaggaatccttttttgataaggacgcaaccgtatttgataccgttgccgaaggtttgggcgaaattcgcgatttattgcgccgttatcatcatgtcagccatgatttggagcacaattcagacgacgttttattaaaagaactcaacgaattacaactcgaaatcgaagcgaaggacggctggaagctggatgcggcagtcaagcagactttgggcgaactcggtttgccggaaaacgaaaaaatcggcaacctttccggcggtcagaaaaagcgtgtcgccttggcgcaggcttgggtgcagaagcccgacgtattgctgctggacgaaccgaccaaccatttggatattgacgcgattatctggttggaaaacctgctcaaggcgtttgaaggcagcttggtcgtgattacccacgatcgccgttttttggacaatatcgccacgcggattgtcgaactcgatcgcggtattttgcgttcctatcccggctcgttctccaaatatagcgagaaaaaagcgcaagagttggtagtcgaagcggaacacaaccgcctcttcgacaaattccacgcgcaggaagaagcgtggatacgcaaaggcatcgaagcgcgccgtacccgcaacgaaggccgcgtgcgccgtttggaagaactgcgccgccagcgtgccgaacgccgcaacggacaagggcaggtcaatttcaagctcgacagcggcgagaaaagcggcaaaatcatcgccgagctggaacacgcctcgtttgcttatggcgacaaagtcattatggacaaattctccgccatcttgcagcgcggcgacaaaatcggcttaatcggtccaaacggcatcggcaaaaccacatttttaaaactgattttgggcgaattgcagccgacctacggcagaatccgtatcggcagcaagcaggaagtcgcctatttcgaccagttccgcagcgcgttgaatgaaaacgacaccgtgttttacacgctcggacagggcaatgattacgttgaagtcggcggtaagaaaaagcatgtgatgagctatttggaagatttcctgttcccccctgcccgcgcgcaaagtcctgtttcttcactctccggcggcgaacgcaaccgccttttgctggcaaaactctttacccgtcccgccaatattttggtcttggacgaaccgaccaatgacttggacatcgacacccaagagctgctcgaagacctgttgcgcgattatcaaggcacggtattccttgtctcgcacgaccgtatgttcctcgataacgtgattacccaaagccttgtttttgaaggaaatggaaggttaaaagaatatatcggcggctatcaggactacatcgacgcaaaatcacgcgaagcgaagattcagacggaatccgcacccaaaacagccgatgccgaaccggtgaaagaaaaacccaaagccaaccgcacggtcaaactgtcctacaaagaacagcgagaactcgatgccctgcccgacgaaatcgccgccttggaagccgaacaggcagaaatcaacgcgcagctttccgatcccgaaatcttcaaagattacgaaaaagccggcgcactgcaaagccgcgccgaagaaatcgaaatgctgcttttggaaaagctggaacgctgggagctgctggaaaccaaacagaacggcaatgccgtctga

SEQ ID NO: 70742 - DNA, 1077 bp, Neisseria meningitidis; identical to SEQ ID NO: 61318

SEQ ID NO: 70743 - DNA, 321 bp, Neisseria meningitidis; identical to SEQ ID NO: 55167

SEQ ID NO: 70744 - DNA, 477 bp, Neisseria meningitidis
atgaacaccatcgcccccaacctcgacggcaaacacctccgcatcggcatcgtacaggcacgtttcaccaacgaaatcggcagcgaaatgctcaaagtctgctgccgcaccctccaagaattgggcgtggcagacgaaaacattaccgtcgccaccgtacccggcgcacttgaaatccccatcacgctgatgaaccttgcctcttctgaaaaatttgacgcactgattgccatcggcgtcgttatccgtggcgaaacctaccatttcgagctggtttccaacgaatccggagcaggggtcagccgcgtcgcactcgactacaacatcccgattgccaatgccgtcctgaccaccgaaaacgacgcacaggcaatcgaacggattgaagaaaaagcctcggatgccgccaaagtcgccgtagaatgcgccaacctcgtcaaccttctgctcgaagaacagtttgaagacgaagaataa

SEQ ID NO: 70745 - DNA, 450 bp, Neisseria meningitidis; identical to SEQ ID NO: 60346

SEQ ID NO: 70746 - DNA, 165 bp, Neisseria meningitidis; identical to SEQ ID NO: 61794

SEQ ID NO: 70747 - DNA, 1893 bp, Neisseria meningitidis
atgcggttctcaaggtttgagcccaaaggtcgtctgaaacaacaaatacggtttcagacgacctttctttcaacaagccaccacggcaatcagacaaaagcagcacatcgccacatccatgtcggcagtacggccggcacaaccaccatccgcagcggcggggataccaccctcaaaggtgcgcagctcatcggcaaaggcatacaggcagatacgcgcaacctgcatatagaaagtgttcaagatactgaaacctatcaaagcaaacaacaaaacgccagtgcacaagtgaccgtaggttatggcttcagtgccagtggcgattacagccaaagcaaaatccgagccgaccatgcttcggtaaccgagcaaagcggtatttatgccggagaagacggctatcaaatcaaggtcggaaaccatacagacctcaaaggcggcatcatcaccagcagccaaagcgcagaagacaagggtaaaaaccgctttcagacggccacccttactgccagcgacattcaaaaccacagccaatacaaaggcgaaagttttggattgggcgcaagtgcgtccataagcggcaaaacactgggacagggcgcacaaaataagcctcaaaacaaacacctgacaagcgtggccgataaaaacggcgcaagttcatcagtgggttatggcagcgacagcgacagtcaaagcagcatcacgaaaagcggcatcaacacccgcaacatacacatcaccgacgaagcgggacaacttgcccgaacaggcaggactgccaaagaaaccgaagcgcgtatctacaccggcatcgacaccgaaactgcggatcaacacacaggccgtctgaaaaacagcttcgacaaagacgcggtcgccaaagagatcaacctgcaaagggaagtaacgaaggagttcggcagaaacgccgcccaagccgtagcggccgttgccgacaaactcggcaatacccaaagttacgaacggtatcaggaagcccgaaccctgctggaggccgaactgcaaaacacggacagcgaagccgaaaaagccgccatccgcgcatccctcggccaagtaaacgcctaccttgccgaaaaccaaagccgctacgacacctggaaagaaggcggcataggcaggagcatactgcacggggcggcaggcggactgacgaccggaagcctcggcggcatactggccggcagcggcacttcccttgctgcaccgtatttggacaaagcggcggaaaacctcggtacggcgggcaaagcggcggtcaacgcactgggcggtgcggccatcggctatgcaactggtggtagtggtggtgctgtggtgggtgcgaatgtagattggaacaataggcagctgcatccgagtgaatataaattagcagaacaatatgcagatatagtggcttctcgtctaaacatttcaaaagaagaagcacttgggcgaattattcggcatatgcaacgaaccgtagattacgcaacggctaaagcggataatttccgtactgatgacgccattatttcaattttaggagcaaacaatttacccaagcaagatcaacattacactaatccgaactacaacaaacaatacattcaaaattatgttcgtgatttcaatttagccaataaatacaattattttgggaaaactcctactcaatcaagggattataaagttggagttgttacagatattggtaaggctgcattaaatagcggtataggtatatttgaatcggctgcgaatttagcgacaggggagatagatccgaactcatgggcttatgtacacatggggcgtataggttatacacatcctgaatatggaaatgcttggattcggatttcaagtgcaacactagtgtattag

SEQ ID NO: 70748 - DNA, 1131 bp, Neisseria meningitidis
atggccaaacatctgccactcgccgtcctgactgctttgctgcttgcagcgtgcggcggttcggacaaaccgcctgccgaaaaaccggcaccggcggaaaaccaaaacgtattgaaaatttacaactggtcggaatacgtcgatccggaaaccgttgccgattttgaaaagaaaaacggcatcaaggttacttatgatgtgtacgacagcgacgaaacactggaaagcaaggtgctgaccggcaaatccggttacgacattgtcgcgccgtccaatgcgtttgtgggcaggcagattaaggcgggggcttatcagaaaatcgataagtcactgattcccaattataaacatctcaaccctgaaatgatgaggctgatggacggggtcgatcccggccacgaatacgccgtgccgttttattgggggacaaataccttcgccatcaataccgaacgcgtgaaaaaggctttgggtacggacaagctgcccgacaaccagtgggatttggtgttcgaccccgaatacacgtccaaactcaaacaatgcggtatcagttatttagacagcgcggcggaaatttatcctatggtgttgaactatttgggtaaaaacccgaacagcagcaatacggaagacatcagggaggcaaccgccctgctcaagaaaaaccgccccaatatcaaacgctttacttcgtccggctttatcgatgatttggcgcgcggcgatacctgcgtaacaatcggtttcggcggcgatttgaacatcgccagacggcgtgccgaagaagcgggcggcaaggaaaaaatccgcgtgatgatgcccaaagagggcgtggggatttgggtggattctttcgtgattccgaaagatgcgaaaaacgtcgccaacgcgcacaaatacatcaacgacttcctcgatccggaagtgtcggcgaaaaacggcaatttcgttacttatgcgccttcgagcaagccggcgcgtgagctgatggaagacgaatttaaaaacgacaatacgattttcccaaccgaggaggatttgaaaaacagctttatcatggtgcctatccagccggcggcattgaagtttatggtgcgccagtggcaggatgtgaaggcggggaaataa

SEQ ID NO: 70749 - DNA, 1065 bp, Neisseria meningitidis; identical to SEQ ID NO: 55751

SEQ ID NO: 70750 - DNA, 300 bp, Neisseria meningitidis; identical to SEQ ID NO: 43627

SEQ ID NO: 70751 - DNA, 225 bp, Neisseria meningitidis; identical to SEQ ID NO: 38642

SEQ ID NO: 70752 - DNA, 933 bp, Neisseria meningitidis; identical to SEQ ID NO: 38763

SEQ ID NO: 70753 - DNA, 171 bp, Neisseria meningitidis; identical to SEQ ID NO: 68562

SEQ ID NO: 70754 - DNA, 372 bp, Neisseria meningitidis; identical to SEQ ID NO: 39277

SEQ ID NO: 70755 - DNA, 642 bp, Neisseria meningitidis; identical to SEQ ID NO: 54483

SEQ ID NO: 70756 - DNA, 225 bp, Neisseria meningitidis; identical to SEQ ID NO: 55961

SEQ ID NO: 70757 - DNA, 1107 bp, Neisseria meningitidis; identical to SEQ ID NO: 41253

SEQ ID NO: 70758 - DNA, 846 bp, Neisseria meningitidis
  misc_feature 823, 824, 825, 826, 827: 'n' is a, c, g or t
atgaacatacaaaacatccgcaccctcctcgacaccgtcgccgttccgaatacggcacgcacgctcggcggcgaaaaggccgtccgttcggtcgaacagcgttcagacggcatccatatcgccctgcatttcggcttccccgtcgcgcacattgcctcagaaacagccgaccgcatacaggaaatcctgatgccgctgacaggcgacacacacatccatctgtccatggacactgaaatcggcacacacaaagtccagcccggcgttaccactattaaaggcgtgaaaaacatcatcgccgtcgcctctggcaaaggcggcgtgggcaaatcaacaaccaccgccaaccttgccgccgcaatggcgcgcatgggcgcgcgcgtcggcgtgctcgatgccgacctttacggcccgagccaaccgaccatgttgggtgtggacgaccgcaaacccaatcagaaaaaccaaaaactcattcccgtcgaatcttcagacggcatacaggtcatgtctatcggctttctcgtcgataccgaccaagccgtcgtctggcgcgggccgatggtcagccaagccttgcagcaactgatgttccaaagcgagtgggacgaagtggactacctgtttatcgacctgcccccgggtacgggcgacatccagctcacgctgtcccaacgcatccccgtaaccggttccgtcatcgtaaccacgccgcaggacatcgccctgatagacgcgcgcaaagccgtggatatgttccgcaaggtcaacattcccattttgggcgtattggaaaatatgtccgtccacatctgcaccaacnnnnncacacacttaattaattaa

SEQ ID NO: 70759 - DNA, 966 bp, Neisseria meningitidis
atgagctacacgcaactgacccaaggcgaacgataccacatccaatacctgtcccgccactgcaccgtcaccgaaatcgccaaacagctgaaccgccacaaaagcaccatcagccgcgaaatcagacggcaccgcacccaagggcagcaatacagcgccgaaaaagcccagcggcaaagccggactatcaaacagcgtaagcgacaaccctataagctcgattcgcagctgattcagcacatcgacccccttatccgccgcaaactcagtcccgaacaagtatgcgcctacctgtgcaaacaccaccagatcacgctccaccacagcaccatttaccgctaccttcgccaagacaaaagcaacggcagcacgttgtggcaacatctcagaatatgcagcaaaccctaccgcaaacgctacggcagcacatggaccagaggcaaagtacccaaccgtgtcggcatagaaaaccgacccgctatcgtcaaccagaaatcccgtatcggcgattgggaagccgacaccattgtcggcaaaggacagaaaagcgcattattgaccttggtcgaacgcgttacccgctacaccatcatctgcaaattggatagcctcaaagccgaagacactgcccgggcagctgttagggcattaaaggcacataaagacagggtgcacaccattaccatggataacggcaaagagttctaccaacacaccaaaataaccaaagcattgaaagcggagacttatttttgtcgcccttaccattcttgggagaaagggctgaatgagaacaccaacggactcatccggcaatacttccccaaacaaaccgatttccgtaacatcagtgatcgggagatacgcagggttcaagatgagttgaaccaccgaccaagaaaaacacttggctacgaaacgccaagtgttttattcttgaatctgttccaaccactaatacactag

SEQ ID NO: 70760 - DNA, 444 bp, Neisseria meningitidis
atgccgttccgcctgtttttagggatattatgcggcctgtcaatggttgcccccgtatatgcacaggggcaaccggatgcggtcaacgcttatattcaaaagaaaaaagtcatcgtaaacacatccaaagcggaactctgttttgccgatgacaggcagtgccaccccgtcctcatcggtgttgccacgcccaaggggacgttcgggctgacgctgaacagtaccgacaagcccggatacggcggcgaagtcatcggtttcaagcaggagggtgattttcttttcgccctgcaccgcgtttggaatcagataccgtcggaaagacggagcgaacgtatcgcatcttcggttgtgtccgacaggattatgaccaacggctgcatcaacgtcagcgatgcggtgtacgaaaaactgcgtcattattttgtgttggaagtgatttga

SEQ ID NO: 70761 - DNA, 3117 bp, Neisseria meningitidis
atgaataaaacttggaaacggcaggttttccgccataccgcgctttataccgccatattgatgttttcccataccggcgggggggggggggcgatggcgcaaaccattaaataccctattatcatgaacaagggaaaccagctcgaggtaaaggggaatgggcaatattcaacaataaaggacaaaaacagggagcgcgaatatactcatcagggcacaaaaggaggaggaggctctgtctcattcaacaataccgatgagcttgtttctcgacaaaacggtactgccgtttttggcacagccacctacctgccgccctacggcaaggtttccggttttgatgccggcgctctgaaagagcgcaacaatgccgtcgattggattcgtaccacccgcatcgcgctggcaggctacgcctacaccgacgccatatgcagaagcagcacaggctgtcccaaacttgtctataaaacccaatttaccttcggtaattccggtttggcaaaaaaggcaaacggcggcgagctggatatatacgtagacaaaagccgcgacaattcgcccatttacaaattgaaggatcatccatggttgggcgtgtctttcaatttgagcgccaagggtaccgccaaagatggtaagacaatcaacaaatttgatgaaaagaatagtaataacaacctcgtctataccacggaaggccgcgatatttccttgggcgactggcagcgcgaaaagaccgccatggcctattatctgaacgccaagctgcacctgctggataaaaaacagattcaaaatatcaccgacaaaacagtgcagttgggtgtcttgaagccgagcatcgatgtgcggcaaggaaataaggggattgccggcattctagcttattgggctaagtgggacattaaagatgacgggcagattccagtcaagctcggcctgcagcaagtcaaagcaggccgctgcatcaataaaccgaaccccaataaaaacagcaaagccctttcgccggccctgactgcccccgcgctgtggttcggacctgtgaaagatggtaaggcggagatgtattccgcttcggtttctacctaccccgacagttcgagcagccaaattttcctgcaaaacctttcccgcaaggatgacacaagcaaaccgggccgctattccctcaaacccttgagtgcgtcggatattcaaagtaaagagccgactttcacagggcggcaaaccgtcatccgattggatggcggcgtacagcagatcaaactggataaaagcaatgaggccgccggtttaaatggaaataccaacaacaacactttcggcattgttaaggacttgggcgtcgaacctgataccaatgagtggaaaaaagtattgctgccttggacggttcggggttttgctgatgacagtgaatttaaaaaattcaacaaagaagaaaaaaacaacgacaacaagccaaaatacagccaaaaataccgcatccgcgaaaacggcaacaatagcaagcgcgatttgggcgacatcgtcaacagccccatcgtggcggtcggcgggtatttggctacttccgccaacgacgggatggtgcatatcttcaaaaaaggcaacggggacgcgcgcgactatagtctgaagctcagctacatccccggcacgatgccgcgcaaggatattcaaagccaagactccaccctcgccaaagagctgcgcgcctttgccgaaaaaggctatgtgggcgaccgctacggcgtggacggcggctttgtcttgcgcaaagtcgaacggaacgggaaagaccatgtgtttatgttcggcgcgatgggctttggcggcagaggcgcgtatgccttggatttgaccaaaatcgacagcaataacctgaccggcgtttccatgtttgatgtccaaaacgacaaaaataacaataagaatgacaataatcgcgtggaattaggctacaccgtcggcacgccgcaaatcggcaaaacccacaacggcaaatacgccgccttcctcgcctctggttatgcgactaaagacgttaacagcaacgacaatacaaccgcgctgtatgtatatgatttggaaagcagcggcaatttgattaaaaaaatcgaagtgaaggacggcaagggcgggctttcgtcccccacgctggtggataaagatttggacggcattgtcgatatcgcctatgccggcgatcgcggcggcagtatgtaccgctttgatttgagcaacaacgatccgaccaaatggtctgtacgtactatttttaaaggcacgccggataagccgattacttccgcgcccgccatttcccaactgaaagacaaacgcgtggttatcttcggcacgggcagtgatttgagtgaggatgatgtgaatagccaagaaatccaacacgtttacggtatttttgacaatgacacaaacacaggtgtggcgaaagacgggcagggcaacgggctgctcgagcaagtgctggaaaaagacaaagacggcaaaacgctgttcttaagtgactacaaaaggtctaacggctcgggcgataagggctgggtagtgaaattggaagccggacagcgcgttaccgtcaaaccgaccgtggtattgcgtaccgcctttgtaaccatccataaatatacgggtaatgacaaatgcggcgcggaaaccgccattttgggcatcaataccgccgacggcggcaagctgaccaagaaaagcgcgcgcccgattgtgccggacgccaatcaggctgtcgcgcaatattccggtcataagaaaggcatcaacggcaaatccatccctataggttgtatgcaaaaaggcaatgaaatcgtctgcccgaacggatatgtttacgacaaaccggttaatgtgcgttatctggatgaaaagaaaacagacggattttcaacaacggcagacggcgatgcgggcggcagcggtatagaccccgccggcaagcgttccggcaaaaacaaccgctgcttctcccaaaaaggggtgcgcaccctgctgatgaacgatttggacagcttggacattaccggcccgacgtgcggtatgaaacgaatcagctggcgtgaaatcttctactga

SEQ ID NO: 70762 - DNA, 999 bp, Neisseria meningitidis; identical to SEQ ID NO: 42406

SEQ ID NO: 70763 - DNA, 537 bp, Neisseria meningitidis; identical to SEQ ID NO: 55395

SEQ ID NO: 70764 - DNA, 540 bp, Neisseria meningitidis; identical to SEQ ID NO: 36581

SEQ ID NO: 70765 - DNA, 1407 bp, Neisseria meningitidis
atggaaaaaaacaccctatccgcccgcgcaccatccccttggctgccgcttctgctggcaattgccatttttatgcagatgttggatgcgaccattttaaataccgcactgcctgaaattgccaccgacctggacgaatcgcctctggatatgcaactggcagtcgttgcctatacgctgacggttgccctgctgattcctttgagcggttatttggcggacaggttcggaacgaaaaaagtctttttcggttcgattgccgtttttatgctcggatcggcattgtgcgccgcatcgggttcgctgtttgaattgacgctttcccgtgtcgttcagggcatcggcggttcgatgctggttccgataccgcgtctgaccatcttgcgtgtgtacgacaagtccaagctgctcaatgccatcaattatgcggttatgcccgcattaatcgggccggttttagggcctttggcgggcggttatttggtcgaatacgcttcgtggcactggattttcctgctcaacctgcccatcggtcttttgggtttcatattgggacgcaacatcatgcccgatgtcaaaggcaacgataccgctctggatttcaaaggctatctgattttttctgccgccgcgtgcctcttgttactttcggcagaaagcctgtcgcacgcgctgcctccgtattttgcactgttgccgctgtgcggcggactgctgtttgcacgccgttatttccgacatatgaaaaccgcgtccaaaccgatttattccgccgacctgtttctgatacgcactttccgtctgggactggcgggcaatctgttcagccgtctcggcatcagctcgattccttttctgatgcccctgatgtttcaagtcgctttcggcttcggcgcaagcctgtcgggttggctggtcgcccccgtcgccctgtcttcgctgctggtcaaaccgctgattgcaccgctcatgaaacgtttcggctaccgcacggtactgctttggaacaccaagctgcttgccgccttcatcatgctgctcgccctgcctgatggaaactcgccgctgtggatttggattttcctctcgctggcgatcggcgcgtgcaactccctacagttttctgccatgaacacactgaccctcgccgatttgcgcccgcaacagaccggcagcggcaacagcctgatggcggtcaaccaacagcttgccatcagcatgggcattgttgtcggcgcattaatccttaaaaactggacatttctgataccggcttcttcaggtctgcattccgccttccgtatgaccctgctcagtatcggcggcattacccttgcctcgtcgttggttttcaagcgtctgcacgtttcagacggtgcaaacctgacacggaacacaccgtcctaa

SEQ ID NO: 70766 - DNA, 1581 bp, Neisseria meningitidis; identical to SEQ ID NO: 60700

SEQ ID NO: 70767 - DNA, 1008 bp, Neisseria meningitidis
atgagcacctcctttcaacaaaccgcccaagccatgattgccaaacacatcgaccggttcccactattgaagttggaccaggtgattgattggcagccgatcgaacagtacctgaatcgtcaaagaacccgttacctccgagaccaccgcggccgtcccgcctacccgctgttgtccatgttcaaagccgtcctgctcggacaatggcacagtctctccgatcccgaactcgaacacagcctcattacccgcatcgacttcaacctgttttgccgttttgacgaactgagcatccccgattacagcaccttatgccgttaccgcaactggctggctcaagacaataccctgtccgaattgctcaaactgattaaccgccaactgaccgaaaaaggtctaaaaatagagaaagcatccgccgccgttgttgacgccaccattattcagaccgccggcagcaaacagcgtcaggctatagaagtcgatgaagaaggacaagtcagcggccaaaccacaccgagtaaagacagcgatgcccgttggataaagaaaaacggcctctacaaactcggttacaaacaacatacccgtaccgatggggaaggctatatcgagaaactgcacatcacccccgccaatgcccatgagtgcaaacacctgccgccgttgttggaaggactgcccaaaggtacgaccgtctatgccgacaaaggctacgacagtgcggaaaactggcaacatctggaagaacatcagttgcaggacggcattatgcgcaaagcctgccgcaaccgtccgctgacggaggcgcaaaccaaacgcaaccgatatttgtcgaagacccgttatgtggtcgaacaaagcttcggtacgttacaccgcaaattccgctatgcgcgggcggcctatttcggactgattaaagtgagtgcgcaaagccatctgaaggcgatgtgtttgaacctgttgaaagcggccaacaggctaagtgcgcccgctgccgcctaa

SEQ ID NO: 70768 - DNA, 441 bp, Neisseria meningitidis
atgatgcagactttccgaaaaatcagcctgtatgccgcaaccttgtggctcggtatgcagattatggcgggttatatcgtcgcgccggtgctgttcaaaatgctgcccaaaatgcaggcgggtgaaattgccggcgtattgttcgacatcctctcttggagcgggcttgccgtttggggcgcggtactggctgccgcctttgccgccctaacccggcggcaaaccaccctgctgctttttttattgtccgcccttgccgccaaccgattcttgattacacccgttatcgaggcgctgaaatacgggcatgagaattggctgttgtcggctttgggcggatctttcggaatgtggcacggtatttccagcatgattttcatggcaaccgccctactttcagcagttttaagttggcggctttccggcaaagaggtcgtctga

SEQ ID NO: 70769 - DNA, 330 bp, Neisseria meningitidis; identical to SEQ ID NO: 37077

SEQ ID NO: 70770 - DNA, 1254 bp, Neisseria meningitidis
gtggacaaactgaaaatctccgcaaacggcccgctcaacggggaaataacggtctcgggcgcgaaaaacgcggcattgccgctgatgtgcgcgggtttgctgacatcgggtacgttgcgcctgaaaaacgtccctatgctggcagatgtgaaaaccacgcaaaagctgcttcaggggatgggcgctcgcgtcctgactgacaatatcagcgaatttgaaatcaacggcggtacggtaaacaatacctgcgccccttacgaattggtccggacgatgcgggcctcgattttggtgctggggcctactttggcacgtttcggcgaggcgcaagtcagcctgccgggcggctgcgccatcggttcgcgccccgtcgatcagcatttgaaaggcttggaagcgatgggtgctgagattgttatcgaacacggttacgtcaaagccaagggtaagcttaaaggcacgcgtgtggcaatggatgtcgttaccgtcggcggcacggaaaacctgctgatggcggcgacgctggcggaaggtacgacggttttggaaaactgcgccatcgagcctgaagtggtcgatttggcggaatgcctggtcaaaatgggcgcgaaaatcagcggcatcggtacgtccacaatgattgtggaaggtgtggacgagctgcacggctgcgaacacagcgtcgtccccgaccggatcgaggcggggacgttcctgtgcgcggtggcgataaccggcggcagggtggttttgcggaatgccgccccgaaaacgatggaagtggtgttggacaaactggttgaggcaggtgcggtgattgaggcgggcgacgattggattgccatcgatatgcgtcaacgtccgaaggcggtggacatccgcacggtcgtccaccccggcttccccacggatatgcaggcgcagtttatggcattgaatgccgtggcagagggaagctgccgcgtggtggaaacgatttttgaaaaccgctttatgcacgtccccgagttgaaccggatgggggcgaacatcacaaccgagggcaatacggcatttgtgcagggtgtggaacagctttccggcgcggtcgttaaggcgacggatttgcgtgcgtccgcaagcctcgttatcgccggtttggcggcgcgcggcgaaaccgtggtcgaacagatttaccacttggatcgcggttatgaaaatattgaaaaaaaactcggcagcgtcggcgcgaaaatcgagcgcgtatccggctga

SEQ ID NO: 70771 - DNA, 996 bp, Neisseria meningitidis; identical to SEQ ID NO: 48353

SEQ ID NO: 70772 - DNA, 561 bp, Neisseria meningitidis; identical to SEQ ID NO: 37658

SEQ ID NO: 70773 - DNA, 1779 bp, Neisseria meningitidis
atgacggttttgaagctttcgcactggcgggtgttggcggagcttgccgacggtttgccgcaacacgtctcgcaactggcgcgtatggcggatatgaagccgcagcagctcaacggtttttggcagcagatgccggcgcacatacgcgggctgttgcgccaacacgacggctattggcggctggtgcgcccattggcggttttcgatgccgaaggtttgcgcgagctgggagaaaggtcgggttttcagacggcattgaagcacgagtgcgcgtccagcaacgacgagatactggaattggcgcggattgcgccggacaaggcgcacaaaaccatatgtgtgacccacctgcaaagtaagggcagggggcggcaggggcggaagtggtcgcaccgtttgggcgagtgtctgatgttcagttttggctgggtgtttgaccggccgcagtatgagttgggttcgctgtcgcctgttgcggcagtggcgtgccggcgcgccttgtcgcgtttgggtttgaaaacgcaaatcaagtggccaaacgatttggtcgtcggacgcgacaaattgggcggcattctgattgaaacggtcaggacgggcggcaaaacggttgccgtggtcggtatcggcatcaatttcgtgctgcccaaggaagtggaaaacgccgcttccgtgcaatcgctgtttcagacggcatcgcggcggggaaatgccgatgccgccgtgttgctggaaacgctgttggcggaacttgatgcggtgttgttgcaatatgcgcgggacggatttgcgccttttgtggcggaatatcaggctgccaaccgcgaccacggcaaggcggtattgctgttgcgcgacggcgaaaccgtgtttgaaggcacggttaaaggtgtggacggacaaggcgttctgcacttggaaacggcagagggcgaacagacggtcgtcagcggcgaaatcagcctgcggcccgacgacaggccggtttccgtgccgaagcggcgggattcggaacgttttctgctgttggacggcggcaacagccggctcaagtgggcgtgggtggaaaacggcacgttcgcaaccgtcggtagcgcgccgtaccgcgatttgtcgcctttgggcgcggagtgggcggaaaaggcggatggaaatgtccgcatcgtcggttgcgccgtgtgcggagaattcaaaaaggcacaagtgcaggaacagctcgcccgaaaaatcgagtggctgccgtcttccgcacaggctttgggcatacgcaaccactaccgccaccccgaagaacacggttccgaccgctggttcaacgccttgggcagccgccgcttcagccgcaacgcctgcgtcgtcgtcagttgcggcacggcggtaacggttgacgcgctcaccgatgacggacattatctcgggggaaccatcatgcctggtttccacctgatgaaagaatcgctcgccgtccgaaccgccaacctcaaccggcacgccggtaagcgttatcctttcccgactacaacgggcaatgccgtcgccagcggcatgatggatgcggtttgcggctcggttatgatgatgcacgggcgtttgaaagaaaaaaccggggcgggcaagcctgtcgatgtcatcattaccggcggcggcgcggcaaaagttgccgaagccctgccgcctgcatttttggcggaaaataccgtgcgcgtggcggacaacctcgtcattcacgggctgctgaacctgattgccgccgaaggcggggaatcggaacatacttaa

SEQ ID NO: 70774 - DNA, 1503 bp, Neisseria meningitidis
atgagtcgtgaaatgttacagctggcagaagcactggcaggcgaaaaaaacgttgatgccgaagtcgtcttccaagcactggaattcgccctgtctaccgccgccaagaaaaaggcagaccgcgaacacatggacgtgcgcgtccaaatcaaccgcgataccggcgaataccaaaccttccgccgctggctgattgtcgccgatgaagactatacctatcccgatgtcgaaaaaaccatcgaggaaatccaagaggaaattcccggcactaccatccaaatcggcgaatactacgaagagcagctgcccaacgaaggcttcggccgccaagccgcgcaaaccgccaaacaaatcatcctgcaacgcatccgcgatgccgagcgcgagcagaatctgaacgagtttctcgccgtcaaagaagacatcgtgtccggcacggtcaaacgcgtcgaacgccacggcatcatcgtcgaagtcgttgccggcaaactggacgcgctgattccgcgcgaccaaatgattccgcgcgaaaacttccgcagcggcgaccgcatccgcgccctcttcctgcgcgtcgaagaaatcggcaacaccggccgcaaacaagtcattctgagccgtacttccggcgatttcctcgtcaaactgtacgccaatgaagtacctgaaattgcagacggcatgcttgaaatccgcgctgtcgcccgcgacccgggacaacgtgccaaagtcgccgtcaaagccaacgaccagcgcatcgatccgcaaggcacctgtatcggcgttcgcggttcgcgtgtcaatgccgtcagcaacgaattgtccggcgagcgcatcgatgtcgtcctctggtcgcccgaacccgcgcaattcgtgatgagcgcgctctcacccgccgaagtcagccgcatcgtcatcgacgaagacaaacacgccgtcgatgtcatcgttgccgaagaccagctcgcgctcgccatcgggcgcggcggtcaaaacgtgcgccttgcttccgacctgaccggctggcagctcaacatcatgacttccgccgaggcagacgaacgcaatgcggcagaagatgccgccatccgccgcctgtttatggatcacttgaacgtggacgaagaaaccgccgacgtactggttcaggaaggttttgcaaccttggaagaagtcgcctatgttcctgccgccgaactgcttgccattgaaggatttgacgaagaaatcgtcgatatgctccgcaaccgcgcccgcgatgccatcctgaccatggcgattgccgccgaagaaaaactgggcgaagtatccgacgatatgcgcaacctcgaaggcatagatgccgatatgctccgcagccttgccgaagcaggcattaccacccgcgacgacttggcagagcttgctgtggacgaactgattgaaatcaccggtgtaaacgaagaaaccgcaaaagccgtcatcctgaccgcacgcgaacactggtttaccgaagacaaataa

SEQ ID NO: 70775 - DNA, 2163 bp, Neisseria meningitidis
atgaacgccccgtttttccgcctcagcctgctctcgcttaccctagcggcaggttttgcccatgcggcagaaaataatgccaatgtcgcattggataccgttaccgtaaaaggcgaccgccaaggcagcaaaatccgtaccaacatcgttacgcttcaacaaaaagacgaaagcaccgcaaccgatatgcgcgaactcttaaaagaagagccctccatcgatttcggcggcggcaacggcacgtcccaattcctgacgctgcgcggcatgggtcagaactctgtcgacatcaaggtggacaacgcctattccgacagccaaatcctttaccaccaaggcagatttattgtcgatcccgctttggttaaagtcgtttccgtacaaaaaggcgcgggttccgcctctgccggtatcggcgcgaccaacggcgcgattatcgccaaaaccgtcgatgcccaagacctgctcaaaggcttggataaaaactggggcgtgcgcctcaacagcggctttgccagcaacgaaggcgtaagctacggcgccagcgtattcggaaaagagggcaacttcgacggcttgttctcttacaaccgcaacgatgaaaaagattacgaagccggcaaaggtttccgcaatgtcaacggcggcaaaaccgtaccgtacagcgcgctggacaaacgcagctacctcgccaaaatcggaacaaccttcggcgacggcgaccaccgcatcgtgttgagccatatgaaagaccaacaccggggcatccgcactgtgcgtgaagaatttaccgtcggcagcgaagattcacggataaatattaaacgccaagcccctgcttaccgcgaaaccacacaatccaacaccaatttggcgtacacgggtaaaaacctgggctttgtcgaaaaactggatgccaacgcctatgtgttggaaaaagaacgctattccgccgatgacagcggcaccggctacgcaggcaatgtaaaaggccccaaccatacccgaatcaccactcggggtatgaatttcaacttcgacagccgccttgccgaacaaaccctgttgaaatacggtatcaactaccgccatcaggaaatcaaaccgcaagcatttttgaacggcgaattctccatcccgacaaaagaaaagaaaaacggtaaagaagtcgataaaccgatggaacaacaaaagaaagaccgtgcagatgaagccactgttcacgcctacaaactttccaatccgaccaaaaccgataccggcgcgtatatcgaagccattcacgagattgacggctttaccctgaccggcgggctgcgttacgaccgcttcaaggtgaaaacccacgacggcaaaaccgtttcaaacagcaaccttaacccgagtttcggcgtgatttggcagccgcacgaacactggagcttcagcgcgagccacaactacgccagccgcagcccgcgcctgtatgacgcgctgcaaacccacggtaaacgcggcatcatctcgattgccgacggcacgaaagccgaacgcgcgcgcaataccgaaatcggcttcaactacaacgacggcacgtttgccgccaacggcagctacttctggcaaaccatcaaagacgcgcttgccaatccgcaaaaccgccacgtctctgccgccgtccgtgaagccgtcaatgccggttacatcaaaaaccacggttacgaattgggcgcgtcctaccgcaccggcggcctgactgccaaagtcggcgtaagccacagcaaaccgcgcttttacgatacgcacaaagacaagctgttgagcgcgaatcctgaatttggcgcacaagtcggccgcacttggacggcctcccttgcctaccgcttccaaaatccgaatctggaaatcggctggcgcggacgctatgttcaaaaagccgtgggttcgatattggtgtcaggtcaaaaaaaccgcgagggcaaattggaaaacgttgtacgccaaggtttcggtgtgaacgatgtcttcgccaactggaaaccgctgggcaaagacacgctcaatgtcaatctttcagtcaacaacgtgttcaacacgttctactatccgcacagccaacgctggaccaataccctgccgggcgtgggacgtgatgtacgcttgggcgtgaactacaagttctaa

SEQ ID NO: 70776 - DNA, 483 bp, Neisseria meningitidis; identical to SEQ ID NO: 38301

SEQ ID NO: 70777 - DNA, 657 bp, Neisseria meningitidis
atggattttgaaaaagcgcggttcaatatggtcgaacagcaaatccgtccgtgggatgtattggattttgacgttttggacgctttggcggagattccgcgcgagctttttgtcgatgaggacttgcagggtttggcgtatgcggatatggcgctgccgcttgccaacggtcataagatgctggagccgaaagtcgtggcgcggctggcgcagggcttgaagctgacgaaaaacgatacggttttggaaatcggcacgggttcgggctatgcgaccgcgctgttggcaaaattggctagtcgtgtggtgtcggacgacatcgatgccgaacagcaaaaccgcgccaaagcggtgttggacggcttgggtttggaaaacattgattatgtgcaaaacaacgggttgaccgaactttccgcaggtgcgccgtttgatgcggtttatgtcggcggtgcggtaaaccttgtgcctgaagtgttgaaagaacagttgaaagatggcggacgcatggtggttatcgtaggccgcaggccggtgcaacgcgcgcttttgattacgcgcaggggcgatgtgtttgaagagaaggtgctgttcgataccttggtggcgcatttggatgataaggatgccgatccgtttggcggttttcagttttga

SEQ ID NO: 70778 - DNA, 720 bp, Neisseria meningitidis; identical to SEQ ID NO: 54461

SEQ ID NO: 70779 - DNA, 114 bp, Neisseria meningitidis; identical to SEQ ID NO: 43789

SEQ ID NO: 70780 - DNA, 783 bp, Neisseria meningitidis
atgaccgacatcctcaataaaatccttaccgccaaggcacaggaagttgccgcccaaaaagccgccgttcccctcgaacacatccgcgcacttgccgcagaagccgcgcccgtccgaagcttcatcggttcgatacgcggcaaacaccgcctaaacctgcccgccgtcattgccgaaatcaaaaaggcaagcccgagcaaaggcctgatccgtccggacttccgaccggccgagattgcacgcgcctatgaaaacgccggagcggcgtgtttgtccgtactgaccgacgaaccctatttccaaggttcgcccgaatacctcaaacaggcgcgcgaagccgtatcgctgcccgtcttgcgtaaagacttcatcatcgacgaatatcaggtttatcaggcgcgcgcctggggggcggatgccgtcctgctgattgccgccgcactggaacgggaacaattggaacgctttgaagcggtggcgcacgaattgggtatgaccgtcctgctcgagctgcacgatgaaagcgaattggaaaaatgccgtaacctgaccacgccgttgtggggcgtaaacaaccgcaacctgaggacttttgaagtctccctcgaccaaaccctgtcgctgctgcccgcactggaaggcaaaaccgtcgttaccgaaagcggcattacgggtaaggcggatgtggaatttatgcgggcgcgcggcgtgcacaccttcctgatcggcgaaacgttcatgcgtgccgacgatattgaggcggaagtgggcaaactcttctaa

SEQ ID NO: 70781 - DNA, 927 bp, Neisseria meningitidis; identical to SEQ ID NO: 54382

SEQ ID NO: 70782 - DNA, 1623 bp, Neisseria meningitidis
atgcaagtaaatattcagattccctgtatgctgtacagacgcgggagtgttaagccccccttgtttgaagctccgcggctcctgccgagcttcaccgaccccgttgtgcccaagctctctgctcccggcggctacattgtcgacatccccaaaggcaatctgaaaaccgaaatcgaaaagctggccaaacagcccgagtatgcctatctgaaacagctccaagtagcgaaaaacgtcaactggaaccaggtgcaactggcttacgataaatgggactataagcaggaaggcttaaccagagccggtgcagcgattatcgcgctggctgttaccgtggttactgcgggcgcgggagtcggagccgcactaggcttaaacggcgcagccgcagcagcggccgatgccgcctttgcctcactcgcttctcaggcttccgtatcgctcatcaacaataaaggcgatgtcggcaaaaccctgaaggaactgggcagaagccgcacggtaaaaaatctggttgtagcggcggcaacggcaggcgtatccaacaaactcggtgcctcttcccttgccacttggagcgaaaccccttgggtaaacaacctcaacgttaacctggccaatgcgggcagtgccgcgctgatcaacaccgctgttaacggcggcagcctgaaagacaatctggaggcaaatatcctagcggcattggtgaataccgcgcatggggaggctgcgagtaagattaagcaattggatcagcactatatcgcccacaaagttgcccatgccgtagcaggctgtgcagcagcgacggcgaataagggtaagtgtcaggacggtgcgattggcgcagccgtgggtgagattgttggggaagctttggttaaaaataccgattttagcgatatgaccccggaacaattagatctggaagttaagaaaattaccgcctatgccaaacttgtggcaggtacagttgcaggcgtaacgggaggagatgtcaatactgctgcacaaaccgcacaaaacgcggtagaaaataatgcggttaaagctgttgtaactgctgcaaaagtggtttataaggtagccagaaaaggattaaaaaacgggaaaatcaacgttagagatttaaaacagacgttgaaagacgaaggttataatttagccgacaacctgaccaccttattcgacgaaacattggattggaacgatgccaaagccgttattgatattgtcgtcggaacagagctgaatcgcgctaataaaggggaagcggcacaaaaggtcaaggaagttttagaaaaaaatcgtccttatatccctaataaaggtgctgtaccgaatatgagtacatacatgaaaaataatccttttggaaaacagctggctcaaatttcagaaaagacaacgcttccgacgcagcaagggcagtctgtcttcttggtaaaaagaaaccaagggttattaaaaaccggtgataggttttatttagatggccaacataaaaatcatttagaggtttttgataaaaatgggaactttaagtttgttctaaatatggatggttcgcttaaccaaatgaaaactggggcagcaaaaggtcgtaaattaaacttaaaatag

SEQ ID NO: 70783 - DNA, 1446 bp, Neisseria meningitidis; identical to SEQ ID NO: 60656

SEQ ID NO: 70784 - DNA, 456 bp, Neisseria meningitidis
atgttcggcggcgcacacgaattaagcatcgacagtaaggggcggttggctgttcctgccaaattccgtgacattctgtcgcgcctctatacgcctgccgtagtggtaacgctcgagtcgaaacacaagctgttgatgtaccctgttgcggagtgggaaaaggttgcggcgcaacttttaaacttaaaagtggcggataaccctgttttgcggcggtttcaaaatcttttgcttcataacgcggaaattttggaatgggacagcgccggccgggtgctgcttcctgccggactgaggaaaagggtggatttcgaccgtgaagtcgttttggtcggtcgtgccaaccgtttggagctttggggtcgcgagcagtgggaggctgagatggttcaggctttggatgacgatcctgacgaacttgccttccagttgggtcagacggatttgcaattgtga

SEQ ID NO: 70785 - DNA, 1455 bp, Neisseria meningitidis; identical to SEQ ID NO: 54380

SEQ ID NO: 70786 - DNA, 1092 bp, Neisseria meningitidis; identical to SEQ ID NO: 61804

SEQ ID NO: 70787 - DNA, 483 bp, Neisseria meningitidis; identical to SEQ ID NO: 37786

SEQ ID NO: 70788 - DNA, 507 bp, Neisseria meningitidis; identical to SEQ ID NO: 61166

SEQ ID NO: 70789 - DNA, 870 bp, Neisseria meningitidis; identical to SEQ ID NO: 39154

SEQ ID NO: 70790 - DNA, 486 bp, Neisseria meningitidis; identical to SEQ ID NO: 61142

SEQ ID NO: 70791 - DNA, 339 bp, Neisseria meningitidis
atgaacacgcgcaccatctacctcgccggcggctgcttctggggcttggaagcctatttccaacgcatcgacggcgtggttgacgcggtatccggctacgccaacggcaacacgaaaaatccgagctatgaagacgtgtcctaccgccatacgggccacgccgaaaccgtcaaagtgacctacgatgccgacaaactcagcctagacgacatcctgcaatatttcttccgcgtcgttgatccgaccagcctcaacaaacagggcaacgacaccggtacgcaataccgcagcggcgtgtactacaccgactactacttaatgaacaaaaaggtcgtctga

SEQ ID NO: 70792 - DNA, 1008 bp, Neisseria meningitidis
atgagcaccttcttccagcaaaccgcccaagccatgattgccaaacacatcgaccgtttcccgctattgaagttggatcaggtaattgattggcagccgatcgaacagtacctgaatcgtcaaaaaacccgttacctcagagaccaccgcggccgtcctgcctatcccctgttgtccatgttcaaagccgtcctgctcggacaatggcacagcctctccgatcccgaactcgaacacagcctcatcacccgcatcgatttcaacctgttttgccgttttgacgaactaagcatccccgattacagcaccttatgccgttaccgcaattggctggctcaagacaataccctgtccgaattgctcaaactgatcaaccgacaactgaccgaaaaaggcctaaaagtagagaaagcatccgccgccgttgttgacgccaccattattcagaccgccgacagcaaacagcgccaggctatagaagtcgatgaagaaggacaaatcaacggccaaaccacaccgagtaaggacagcgatgcccgttggataaagaaaaacggcctctacaaactcggttacaaacaacatacccgtaccgatgcggaaggctatatcgagaaactgcacatcacccccgccaatgcccatgagtgcaaacacctgtcgcctttgctggaaggactgcccaaaggtacgaccgtctatgccgacaaaggctacgacagtgcggaaaaccggcaacatctggaagaacatcagttgttagacggcattatgcgcaaagcctgccgcaaccggccgctgtcggaagtgcaaaccaaacgtaaccgatatttgtcgaagacccgttatgtggtcgaacagagcttcggtacgctgcaccgtaaattccgctatgcgcgggcagcctatttcgggctgctcaaagtgagtgcgcaaagccacctgaaggcgatgtgtttgaacctgttgaaagccgccaacaggctaagtgcgcccgctgccgcctaa

SEQ ID NO: 70793 - DNA, 714 bp, Neisseria meningitidis; identical to SEQ ID NO: 54498

SEQ ID NO: 70794 - DNA, 609 bp, Neisseria meningitidis; identical to SEQ ID NO: 39049

SEQ ID NO: 70795 - DNA, 1635 bp, Neisseria meningitidis; identical to SEQ ID NO: 55479

SEQ ID NO: 70796 - DNA, 153 bp, Neisseria meningitidis
  misc_feature 130, 131, 132, 133, 134: 'n' is a, c, g or t
atgaaaaacgttcaaaaaggctttacgctgctcgagctgatgattgccgtcgccatcctcggcatcctgacgcttatcacctacccttcctataaaacctacatccggcgcgtccgcctgtcggaagtcnnnnncacacacttaattaattaa

SEQ ID NO: 70797 - DNA, 1977 bp, Neisseria meningitidis
atgccacgcattgccgccctgcccgaccatcttgtcaaccaaatcgccgccggcgaagtggtcgaacgccccgccaacgccttaaaagaaatcgttgaaaacagcatagacgcaggcgcgacggcgattgatgtcgaactggcgggcggcggcatccgtctcatccgcgtcagcgacaacggcagcggtatccatccggacgacatcgaactcgcgctccaccgccacgccaccagcaaaatcaaaaccttaaatgacttggaacacgtcgccagcatgggctttcgcggcgaaggcttggcaagcatcgcctccgtcagccgcctgaccctgaccagccgtcaagaagacagttcgcacgcaacccaagtcaaagccgaagacggcaaactcagcagccccaccgccgccgcccaccccgtcggcaccaccatcgaagctgccgaactcttcttcaacacccccgcgcggcgcaagttcctcaagtctgaagccaccgaatacgcccactgcgccactatgctcgaacgcctcgcactggcgcatccgcacattgccttctcactcaaacgcgacggcaaacaagtgttcaaactccctgcacaaagcctgcatgaacggattgccgccattgtcggcgatgattttcagacggcatcattggaaatcgacagcggcaatggcgcattgcggctctatggcgcgattgccaagccgactttcgccaaaggcaaaaccgacaaacaatactgcttcgtcaaccatcgttttgtccgcgacaaagtgatgctccacgccgtcaagcaggcataccgcgacgtattgcacaacgcgctgacacccgctttcgtccttttcctcgacctgccgcccgaagccgtagatgtcaacgtccacccgaccaaaacagaaatccgcttccgcgacagccggcaggtgcaccaactcgtgttccatacgctcaacaaagcccttgccgacacgcgtgccgacctgaccgaaagcgtcggcaacgcaggcgaagtgctgcatgacattaccggcgttacgcctgcaccaatgccgtctgaaaacgacagcgaaaatctgtttaatcgcgcatccgactacccgacaggcaacaaacccgatacgcgcaatgcctttggtgcatcaggcaaaaccgcgcctatgccctatcagtccgcatatgcgccgcaacaacgcagcctgtccctgcgcgaaagccgcgcggcaatgaacacctatgccgaactctacaaaaaaaccgacgacatcgaccttgagttaagccgattcgagcaggcacgtttcggcaatatgccgtctgaaacgcctgctccccaaacagatacgccgctttcagacggcatcccgtcccaatccgaactgccgccgctcggttttgccattgcccaactattaggcatctacattcttgcccaagccgaagacagcctgctgctcatcgatatgcacgccgccgccgaacgcgtcaactacgaaaaaatgaaacgccaacgtcaggaaaacggcaggctgcaaagccaacgcctgcttattcccgtaacctttgccgcgtcccacgaagaatgcgccgcccttgccgaccatgctgatgcactggcaggcttcggcttggaattgtccgatatgggcggcaacaccctcgccgtccgcgcagttcccgcaatgttgggcaaatccgacatcgtctcgctcgcccgcgacgtattgggcgaactcgcccaagtcggcagcagccaaaccatcgaagaacacgaaaaccgcatcctcgccactatgtcctgccacggctcgatccgcgccggccgccggctcaccctgcccgaaatgaacgcccttctgcgcgatatggaaaatacgccgcgcagcaaccagtgcaaccacggcaggccgacttgggtcaaactgactttgaaagaattggacgcactgttcttgcgcggacagtaa

SEQ ID NO: 70798 - DNA, 861 bp, Neisseria meningitidis
atgtctgatttgtctgtattgtcgccgtttgccgtgcctttggcagcggtgttcgggctgctggtcggcagtttcttaaacgtcgtcatttaccgcgtgccggtcatgatggaacgcggctggacggtatttgccaaagaatatttaaacctgccgctgaccgaagaggaaagccgtaccttcaacctgatgaaaccggattcctgctgtcccaaatgccgcgtgccgatacgcgcgtggcagaacatcccgattgtcagctacctgctcctgcgcggcaaatgcgcctcctgccaaaccaaaatcagcatacgctatcccttaatcgaactgctgaccggcgtattgttcgggctggttgcctggcaatacggctggtcttggattacattgggcggtttgatactgacggcgtttctgatttccctgacctttatcgatgcggacacccaatatctgcccgactcgatgacattatccttgatttggctggggctgatatttaatttggacggcggcttcgtgcctttgcagtctgccgttttaggtgcggttgccggctatggttcgatatggcttttatgtgcagtgtataaactgctcacaagaaaaaccggtatgggcaacggagatttcaaactgattgccgcattgggcgcgtggctcggcatatccgcattgcccgtgctgatttttgtttcctcgctgatcggtttggtcgcggcaatcgttatgcgcgtcgccaaggggcagcattttgccttcggccccgcactgacagtttcgggctggataatttttacggcaaacgattccgtatggcgggcggtcaactggtggctgacccatccggtgctgtaa

SEQ ID NO: 70799 - DNA, 732 bp, Neisseria meningitidis
ttgcaagatcgtaccggtcaaaaagtaccttccgtagtattccgcacccgcgtcggcgacacttggaaagatgtgtctaccgatgatttgttcaaaggcaaaaaagtagtcgtattctccctgcccggtgcatttaccccgacttgttcttcttcacacctgccgcgttacaacgaattgttcggcgcgttcaaagaaaacggcgttgacgcaatctactgcgtatctgtaaacgatacgttcgtaatgaacgcttgggctgccgaagaagaatccgacaacatctacatgattcctgatggcaacggcgaatttaccgaaggtatgggtatgctggtcggtaaagaagacttgggcttcggtaaacgctcttggcgttactccatgctggttaacgacggcgtggttgaaaaaatgttcatcgaacctgaagaaccgggcgatccgttcaaagtatccgatgcagatactatgctgcaattcgttgctcccgattggaaggctcaagagtctgtggcaattttcactaaaccaggttgccaattctgcgctaaagccaaacaagctttgcaagataaaggtttgtcttacgaagaaatcgtattgggcaaagatgcaaccgttacttccgttcgcgccattaccggcaagatgactgcccctcaagtcttcatcggcggcaaatacatcggcggcagcgaagatttggaagcttacttggctaaaaactga

SEQ ID NO: 70800 - DNA, 1350 bp, Neisseria meningitidis
atggcaaaccaaaccaatagcaaagcaaaagcattgttaggctgggtagatgcccgttttccattaagtaaaatgtggaaagagcatctgtctgaatactatgcgcctaaaaacttcaacttctggtatttcttcggctcattgtctatgctggtgctggtgattcaaatcgtcagcggtattttcctgaccatgaactacaaaccggacggcaaccttaacgcctaccatctgcctgctgcctttaccgcagtagagtacatcatgcgcgacgtgtccggcggctggattatccgctatatgcactctaccggcgcatctttcttcttcatcgtcgtttatctgcacatgttccgtggtctgatttacggttcgtacaaaaaaccgcgcgaattggtgtggattttcggttctttgattttcttggcattgatggcggaagcctttatgggctacctgttgccttggggtcaaatgtccttctggggtgcgcaggtaattattaacctgttctccgccatcccggttatcggtcctgatttgtccacttggatccgcggcgacttcaacgtttccgacgttaccctgaaccgcttctttgccctgcacgttatcgcagtacctctggtattgctcggcttggttgtggctcatatcattgccttgcatgaagtgggttccaacaaccctgacggtgtagaaatcaaaaagctgaaagatgaaaacggtgtccctctagatggcatacctttttttccgtattatgttgtgcatgatatattggcagtaacgatattcttgattgtcttctgtgccgtgatgttctttgcacctgaaggcggcggctacttcttggaagcgccaaacttcgatgcagcgaatgcgctgaaaacacctccgcacattgcgccggtatggtacttcactccgttctacgcaattctgcgtgcgattccttcctttgccggtactcaggtatggggtgtaatcggtatgggcgcggcggtcgtgttgattgccctgctgccttggctggataggggcgaggtgaaatccgtccgttaccgcggcccgattttcaaaaccgcattggtcttgttcatcatttcctttatcggtttgggtattttgggtgcaatggtagcaactgatactcgtactttggttgcacgtatcctgtctttcgtctactttgcattcttcctgggtatgccgttctataccaaactggataccaacaaaccagttcctgaacgcgtaaccatgagcactactaaacaaaaaattatgttctttgtttacgtcggtattaccgttgttggtgcttacttgtttgcaaccaatatctga

SEQ ID NO: 70801 - DNA, 1623 bp, Neisseria meningitidis; identical to SEQ ID NO: 55367

SEQ ID NO: 70802 - DNA, 360 bp, Neisseria meningitidis; identical to SEQ ID NO: 55655

SEQ ID NO: 70803 - DNA, 5589 bp, Neisseria meningitidis
atgaataaaggtttacatcgcattatctttagtaaaaagcacagcaccatggttgcagtagccgaaactgccaacagccagggcaaaggtaaacaggcaggcagttcggtttctgtttcactgaaaacttcaggcgacctttgcggcaaactcaaaaccacccttaaaaccttggtctgctctttggtttccctgagtatggtattgcctgcccatgcccaaattaccaccgacaaatcagcacctaaaaaccagcaggtcgttatccttaaaaccaacactggtgcccccttggtgaatatccaaactccgaatggacgcggattgagccacaaccgctatacgcagtttgatgttgacaacaaaggggcagtgttaaacaacgaccgtaacaataatccgtttctggtcaaaggcagtgcgcaattgattttgaacgaggtacgcggtacggctagcaaactcaacggcatcgttaccgtaggcggtcaaaaggccgacgtgattattgccaaccccaacggcattaccgttaatggcggcggctttaaaaatgtcggtcggggcatcttaactatcggtgcgccccaaatcggcaaagacggtgcactgacaggatttgatgtgcgtcaaggcacattgaccgtaggagcagcaggttggaatgataaaggcggagccgactacaccggggtacttgctcgtgcagttgctttgcaggggaaattacagggtaaaaacctggcggtttctaccggtcctcagaaagtagattacgccagcggcgaaatcagtgcaggtacggcagcgggtacgaaaccgactattgcccttgatactgccgcactgggcggtatgtacgccgacagcatcacactgattgccaatgaaaaaggcgtaggcgtcaaaaatgccggcacactcgaagcggccaagcaattgattgtgacttcgtcaggccgcattgaaaacagcggccgcatcgccaccactgccgacggcaccgaagcttcaccgacttatctctccatcgaaaccaccgaaaaaggagcggcaggcacatttatctccaatggtggtcggatcgagagcaaaggcttattggttattgagacgggagaagatatcagcttgcgtaacggagccgtggtgcagaataacggcagtcgcccagctaccacggtattaaatgctggtcataatttggtgattgagagtaaaactaatgtgaacaatgccaaaggctcggctaatctgtcggccggcggtcgtactacgatcaatgatgctactattcaagcgggcagttccgtgtacagctccaccaaaggcgatactgaattgggtgaaaatacccgtattattgctgaaaacgtaaccgtattatctaacggtagtattggcagtgctgctgtaattgaggctaaagacactgcacacattgaatcgggcaaaccgctttctttagaaacctcgaccgttgcctccaacatccgtttgaacaacggtaacattaaaggcggaaagcagcttgctttactggcagacgataacattactgccaaaactaccaatctgaatactcccggcaatctgtatgttcatacaggtaaagatctgaatttgaatgttgataaagatttgtctgccgccagcatccatttgaaatcggataacgctgcccatattaccggcaccagtaaaaccctcactgcctcaaaagacatgggtgtggaggcaggcttgctgaatgttaccaataccaatctgcgtaccaactcgggtaatctgcacattcaggcagccaaaggcaatattcagcttcgcaataccaagctgaacgcagccaaggctctcgaaaccaccgcattgcagggcaatatcgtttcagacggccttcatgctgtttctgcagacggtcatgtatccttattggccaacggtaatgccgactttaccggtcacaataccctgacagccaaggccgatgtcaatgcaggatcggttggtaaaggccgtctgaaagcagacaataccaatatcacttcatcttcaggagatattacgttggttgccggcaacggtattcagcttggtgacggaaaacaacgcaattcaatcaacggaaaacacatcagcatcaaaaacaacggtggtaatgccgacttaaaaaaccttaacgtccatgccaaaagcggggcattgaacattcattccgaccgggcattgagcatagaaaataccaagctggagtctacccataatacgcatcttaatgcacaacacgagcgggtaacgctcaaccaagtagatgcctacgcacaccgtcatctaagcattaccggcagccagatttggcaaaacgacaaactgccttctgccaacaagctggtggctaacggtgtattggcactcaatgcgcgctattcccaaattgccgacaacaccacgctgagagcgggtgcaatcaaccttactgccggtaccgccctagtcaagcgcggcaacatcaattggagtaccgtttcgaccaagactttggaagataatgccgaattaaaaccattggccggacggctgaatattgaagcaggtagcggcacattaaccatcgaacctgccaaccgcatcagtgcgcataccgacctgagcatcaaaacaggcggaaaattgctgttgtctgcaaaaggaggaaatgcaggtgcgcctagtgctcaagtttcctcattggaagcaaaaggcaatatccgtctggttacaggagaaacagatttaagaggttctaaaattacagccggtaaaaacttggttgtcgccaccaccaaaggcaagttgaatatcgaagccgtaaacaactcattcagcaattattttcctacacaaaaagcggctgaactcaaccaaaaatccaaagaattggaacagcagattgcgcagttgaaaaaaagctcgcctaaaagcaagctgattccaaccctgcaagaagaacgcgaccgtctcgctttctatattcaagccatcaacaaggaagttaaaggtaaaaaacccaaaggcaaagaatatctgcaagccaagctttctgcacaaaatattgacttgatttccgcacaaggcatcgaaatcagcggttccgatattaccgcttccaaaaaactgaaccttcacgccgcaggcgtattgccaaaggcagcagattcagaggcggctgctattctgattgacggcataaccgaccaatatgaaattggcaagcccacctacaagagtcactacgacaaagctgctctgaacaagccttcacgtttgaccggacgtacgggggtaagtattcatgcagctgcggcactcgatgatgcacgtattattatcggtgcatccgaaatcaaagctccctcaggcagcatagacatcaaagcccatagtgatattgtactggaggctggacaaaacgatgcctataccttcttaaaaaccaaaggtaaaagcggcaaaatcatcagaaaaaccaagtttaccagcacccgcgaccacctgattatgccagcccccgtcgagctgaccgccaacggtatcacgcttcaggcaggcggcaacatcgaagctaataccacccgcttcaatgcccctgcaggtaaagttaccctggttgcgggtgaagagctgcaactgctggcagaagaaggcatccacaagcacgagttggatgtccaaaaaagccgccgctttatcggcatcaaggtaggtaagagcaattacagtaaaaacgaactgaacgaaaccaaattgcctgtccgcgtcgtcgcccaaactgcagccacccgttcaggctgggataccgtgctcgaaggtaccgaattcaaaaccacgctggccggtgccgacattcaggcaggtgtaggcgaaaaagcccgtgtcgatgcgaaaattatcctcaaaggcattgtgaaccgtatccagtcggaagaaaaattagaaaccaactcaaccgtatggcagaaacaggccggacgcggcagcactatcgaaacgctaaaactgcccagcttcgaaagccctactccgcccaaattgtccgcacccggcggctatatcgtcgacattccgaaaggcaatctgaaaaccgaaatcgaaaagctgtccaaacagcccgagtatgcctatctgaaacagctccaagtagcgaaaaacatcaactggaatcaggtgcagcttgcttacgacagatgggactacaaacaggagggcttaaccgaagcaggtgcggcgattatcgcactggccgttaccgtggtcacctcaggcgcaggaaccggagccgtattgggattaaacggtgcggccgccgccgcaaccgatgcagcattcgcctctttggccagccaggcttccgtatcgttcatcaacaacaaaggcgatgtcggcaaaaccctgaaagagctgggcagaagcagcacggtgaaaaatctggtggttgccgccgctaccgcaggcgtagccgacaaaatcggcgcttcggcactgaacaatgtcagcgataagcagtggatcaacaacctgaccgtcaacctggccaatgcgggcagtgccgcactgattaataccgctgtcaacggcggcagcctgaaagacaatctggaagcgaatatccttgcggctttggtgaatactgcgcatggagaagcagccagtaaaatcaaacagttggatcagcactacatagtccacaagattgcccatgccatagcgggctgtgcggcagcggcggcgaataagggcaagtgtcaggatggcgcgatcggtgcggtcgtgggggagattgtcggggaggctttggttaagaataccgatttcagcggtatgactgcttctgaaattgaaaaagctaaagcgaatattactgcgtatgcaaaactggtagccggagcgactgtaggtgttacaggaggcaatgttgatgtggcggcaaatgcttccgaaacagctgttaaaaataatgcattagatattatttgggatatcggcaacctcgtatgggacggcggtaaatggatttacgccaaatctattggcgataagcagatggctcgagaagcggcgattgattttggtgtggatgccgccgcagctgccgttccctttgttccggcaggtgcgactaaaatcagccgaggcggggcttatgttctgaaggcgggagacgaagcagttgatacggctaaagccatacaggaaattcagaagcagaccggaatcaagcttacttatgataaggttaataaggtttggacaacaccggcggggttagattatgggttagatgctaagcatggtaataggattaaacatgttttagcccatacaattccaaatccaaacaaacctgttcattctgtttttaatgtgtcccgtaaagaagttttgcctttggttgatgaagcttggagaatgaaaggaaatcctttgccaaatgattcatccgtatatcttgtagatatgaagaaacctattggaacaaaaggagaaacaaaagtgcggattgttgtgcaaaaaggaacaaataaaatcatttctgcatatcctcagaaataa

SEQ ID NO: 70804 - DNA, 2151 bp, Neisseria meningitidis
atgaaaaccccactcctcaagcctctgctcattacctcgcttcccgttttcgccagtgtttttaccgccgcctccatcgtctggcagctaggcgaacccaagctcgccatgcccttcgtactcggcatcatcgccggcggccttgtcgatttggacaaccgcctgaccggacggctgaaaaacatcatcgccaccgtcgccctgtttaccctctcctcgctcacggcacaaagcaccctcggcacagggctgcccttcatcctcgccatgaccctgatgaccttcggctttaccattttaggcgcggtcgggctgaaataccgcaccttcgccttcggcgcactcgccgtcgccacctacaccacacttacctacacccccgaaacctactggctgaccaaccccttcatgattttatgcggcaccgtactgtacagcaccgccatcatcctgttccaaatcatcctgccccaccgccccgtccaagaaagcgtcgccaacgcctacgacgcactcggcggctacctcgaagccaaagccgacttcttcgaccccgatgaggcagcctggataggcaaccgccacatcgacctcgccatgagcaacaccggcgtcatcaccgccttcaaccaatgccgttccgccctgttttaccgtttgcgcggcaaacaccgccacccgcgcaccgccaaaatgctgcgctactacttcgccgcccaagacatccacgaacgcatcagctccgcccacgtcgactaccaagagatgtccgaaaaattcaaaaacaccgacatcatcttccgcatccaccgcctgctcgaaatgcagggacaagcctgccgcaataccgcccaagccctgcgcgcaagcaaagactacgtttacagcaaacgcctcggccgcgccatcgaaggctgccgccaatcgctgcgtctcctttccgacggcaacgacagccccgacatccgccacctgcgccgtcttctcgacaacctcggcagcgtcgaccaacaattccgccaactccagcacaacggcctgcaggcagaaaacgaccgcatgggcgacacccgcatcgccgccctcgaaaccggcagcctcaaaaacacctggcaggcaatccgtccgcagctaaacctcgaatcaggcgtattccgccatgccgtccgcctgtcccttgtcgttgccgccgcctgcaccatcgtcgaagccctcaacctcaacctcggctactggatactactgaccgcccttttcgtctgccaacccaactacaccgccaccaaaagccgcgtccgccagcgcatcgccggcaccgtactcggcgtaatcgtcggctcgctcgtcccctacttcaccccgtctgtcgaaaccaaactctggattgtcatcgccagtaccaccctctttttcatgacccgcacctacaaatacagtttctccaccttcttcattaccattcaagccctgaccagcctctccctcgcaggtttggacgtatacgccgccatgcccgtacgcatcatcgacaccattatcggcgcatcccttgcctgggcggcagtcagctacctgtggccagactggaaatacctcacgctcgaacgcaccgccgcccttgccgtatgcagcaacggtgcctatctcgaaaaaatcaccgaacgcctcaaaagcggcgaaaccggcgacgacgtcgaataccgcgccacccgccgccgcgcccacgaacacaccgccgccctcagcagcaccctttccgacatgagcagcgaacccgcaaaattcgccgacagcctgcaacccggctttaccctgctcaaaaccggctacgccctgaccggctacatctccgccctcggcgcataccgcagcgaaatgcacgaagaatgcagccccgactttaccgcacagttccacctcgccgccgaacacaccgcccacatcttccaacacctgcccgaaaccgaacccgacgactttcagacggcattggatacactgcgtggcgaactcgacaccctccgcacccacagtagcggaacacaaagccacatcctcctccaacagctccaactcatcgcccgacagctcgaaccctactaccgcgcctaccgccaaattccgcacaggcagccccaaaacgccgcctga

SEQ ID NO: 70805 - DNA, 303 bp, Neisseria meningitidis
ttgggattcaataatcttgtttcgcttgccgcgttgattgaaaaggttttccctattcgatatacgcctgctggaatctctgtcttagatattattttaaagcatgaatcatggcaggaggaaaacgggcagcaatgccttgtccaattggaaattccggcacggattttaggcaggcaggcggaagagtggcagtatcggcaaggtgtatatgttcacgtcgaaggttttttagctcaaaaaagcagacgttcccttatgccgatgctcaggatacaaaatattcaagaatataaaggttaa

SEQ ID NO: 70806 - DNA, 606 bp, Neisseria meningitidis; identical to SEQ ID NO: 61088

SEQ ID NO: 70807 - DNA, 690 bp, Neisseria meningitidis; identical to SEQ ID NO: 36702

SEQ ID NO: 70808 - DNA, 828 bp, Neisseria meningitidis
atggatggagaaggtatgtcggttgggcattatgaaaattttcccgtcggttcgctgattttgccgcgcaggttgaggaagccggttcacgcggtgtacgcgtttgcacggacggcggacgatatggcggacgagggcagtatgccgtctgaagccaggttggcggggttggagggtttgcggcgcgagttggacgtgttggcatcgggcggccggtcggcgcatcctttgattgcacgattggatgccgaggcggttgtgccgttcggtttggatttgcagccgttttatgatttgctttctgcattttctcaggatgtggttaaaacaaggtatggaaatttcggcgagctggccgattattgccgacgttctgccaatcctgtcggacgcattatgctggctttgtacgggaaaacggatgcggtgtgcgtggcgcaaagcgacggcatctgtacggctttgcaactggtgaatttttggcaggatgtggctgtggattggcaaaagggcagggtttatattccgcaggacgatttgttgaaattcggtgtttccgaaggacagattgcggagggtagggcggatgcggcgtttcagcggctgatggcgtatgagtgccggcgcgcatttcgtatgctgaaggcgggttcgcctttagcgcgcgaattgaaagggcgtatcggtttggaactccgtatgattgtgttaggggcgcagttgattttgcagaaactggacgcgtgccgatacgatgtgtttgcacaacgccccgttttggataagaaggattggttgattatgttgaaacgcgcgttgtggaaatga

SEQ ID NO: 70809 - DNA, 630 bp, Neisseria meningitidis
ttggtcagaacggcagacggctacaaagccattgcccatattcaagccggagaccgcgtcctttccaaggacgaggcaagcgggaaaacagaatacaaacccgttaccgcccgatacggtaatccgtaccaggaaaccgtttacattgaagtttcagacggcatcggcaacagccaaaccctgatttccaaccgcatccacccgttttattcggacggcaaatgggttaaggcggaagacttaaaggcgggaagcagactgttatccgaaaacggcagaacccaaaccgtccgcaacatcgttgtcaaaccaaaaccgctcaaagcctacaatctgaccgttgctgactggcatacctacttcgtcaagggcagtcaggcggaaacggaaggggtttgggttcataatgcgtgtccgcctaaaagaacaggaagctccaagaatgaaaaacatggagatggcggtcgaagtcaaatatcagcagaatcacgaattgctgaattaaaaaataaaattattcccggaatgtccaaaaatgaacgattaaagattgagcgaacaatcagaaatattacaaaaaatgccaatcgaaaagcaaaaggagaagagcatggtcgacgcggtcgttaa

SEQ ID NO: 70810 - DNA, 606 bp, Neisseria meningitidis; identical to SEQ ID NO: 38535

SEQ ID NO: 70811 - DNA, 1170 bp, Neisseria meningitidis; identical to SEQ ID NO: 55287

SEQ ID NO: 70812 - DNA, 1197 bp, Neisseria meningitidis
  misc_feature 6, 7, 8, 9, 10: 'n' is a, c, g or t
gtgtgnnnnnaaaaacacgcgccgttttggggcgtggtcgcgcaaatcctgatactggatgccgtgttttccatcgattcggtcattactgcggtggcgatggtcgatcatatcgtcgtggcgatgggtgcggtcgtcgtcgcaatggctgtaatgatttctgccagcaaactcttgaccgaatttgtcgacagacaccctaccgtcgtgatgctctgccttggttttttgttgatgatcggtttcagcctgattgccgaagccttccatttccacattcccaaaggctacctctacgccgccatcggcttctcgattttaatcgaactgtttaaccagatttcccagcgcaacagccgcaaaaacgactacatcggcagctcgtggcgcaaacggactgctgaaaatgtcttgggtatgatgggcatacgcgaaagcgtgcttgccgacgcgggcggcgaatccggggacgacgcgcattttgaagaaaacgaaaaatcgatgatacgcagcgtgctgacgcttgccgaacgcccgattatgggggtgatgatcccacgccgcgacatcgaacggctggacatttcccaaagccgcgaagaacagtatgcccaactgcaaaacacgccttacagccgcctgctcgttgtcggaaaggcgggcgtggacgaacctttgggctacatcaacaaaaaagacctgctgtcccaactgctggaaacaggcggtctcgacattcagacggcattgcgccagccgctcgtcctacccgacggcacgaccgccttgggcgcgctcgaactcttccgccaaagcagcgcggattacgccctcgtcgtggacgagttcggcgcggtgttgggtatggtgacgatgaaagacctgttggaagccattgccggcgactttcccgaagaattcgaacgcgaagaagaaccagccgttcaggggaatcccgatgaaagcctgacggtggaaggcgcgttggaatatgtggagctggcatcccaactcaatctgccgcagcaggaggaagatgccgatttccatacggttgccgggctgattatggaagaattgcaaaccatccccgatgtcggtgattttgccgatttccacggctggcggtttgaagtggtcgaaaaagaagggcagcgcatcgagcgggtcaaaatcaccaaattgcccgaagaataa

SEQ ID NO: 70813 - DNA, 729 bp, Neisseria meningitidis
atgcttttgggtgtcaacatcgaccacatcgccaccgtccgcaacgcgcgcggcacgacttatcccagccccgtggaggcggcactggttgccgaaacgcacggtgccgacctgattaccatgcacctgcgcgaagaccgccgccacatcaaagacgcggacgtgtttgccgtcaaaaacgccatccgcacgcgcctgaaccttgaaatggcgttgacggaagaaatgctcgaaaacgcgcttaaagtgatgccggaagacgtgtgcatcgtgcctgaaaaacggcaggaaatcacgaccgaaggcggtttggacgtattggcgcaacaggaaaaaatcgccgaattcaccaaaatcctgaccgacgcgggcatacgcgtgtctttgtttatcgatgccgacgacaggcaaatccaagccgcctatgatgtcggcgcgcccgttgtcgagctgcacaccggcgcatatgccgacgcgcgcagccacgccgaacaaatcaggcagttcgagcgcatccaaaacggcgcgcatttcgccggcgatttgggcttggtcgtcaacgccggacacggactgaccatacacaacgttacccccatcgcccaaatcctcgccatccgcgaactgaacatcgggcattcgctgattgcccaagccctcttcctcggactgcccgaagccgtgcgccagatgaaggaggcgatgttcagggcaaggctgctgccgtaa

SEQ ID NO: 70814 - DNA, 1350 bp, Neisseria meningitidis
atgttgaatccatcccgaaaactggttgagctggtccgtattttggacgaaggcggttttattttcagcggcgatcccgtacaggcgacggaggctttgcgccgcgtggacggcagtacggaggaaaaaatcatccgtcgggcggagatgatcgacaggaaccgtatgctgcgggagacgttggaacgtgtgcgtgcggggtcgttctggttgtgggtggcggcggcgacgttttcgttttttaccggtttttcaggaacttatcttctaatggacaatcagggtctgaatttctttttggttttggcgggcgtgttgggcatgaatacgctgatgctggcagtatggttggcaatgttgttcctgcgcgtgaaagtggggcgttttttcagcagtccggcgacgtggtttcggggcaaagaccctgtaaatcaggcggtgttgcggctgtatgcggacgagtggcggcaaccttcggtacgttggaaaataggcgcaacgtcgcacagcctgtggctctgcacgctgctcggaatgctggtgtcggtattgctgctgcttttggtgcggcaatatacgttcaactgggaaagcacgctgttgggcgattcgtcttcggtacggctggtggaaatgttggcatggctgcctgcgaaactgggttttcccgtgcctgatgcgcgggcggtcatcgaaggtcgtctgaacggcaatattgccgatgcgcgggcttggtcggggctgctggtcggcagtatcgcctgctacggcatcctgccgcgcttcttggcttgggcggtatgcaaaatccttttgaaaacaagcaaaaacggcttggatttggaaaaaccctattatcaggcggtcatccgccgttggcagaacaaaatcaccgatgcggatacgcgtcgggaaaccgtgtccgccgtttcgccgaaaatcgtcttgaacgatgcgccgaaatgggcggtcatgctggagaccgaatggcaggacggcgaatggttcgagggcaggctggcgcaggaatggctggataagggcgttgccaccaatcgggaacaggttgccgcgctggagacagagctgaagcagaaaccggcgcaactgcttatcggcgtgcgcgcccaaactgtgcccgaccgcggcgtgttgcggcagatcgtccgactttcggaagcggcgcagggcggcgcggtggtgcagcttttggcggaacaggggctttcagacgacctttcggaaaagctggaacattggcgtaacgcgctggccgaatgcggcgcggcgtggctggaacccgacagagcggcgcaggaaggccgtctgaaaaccaacgaccgcacttga

SEQ ID NO: 70815 - DNA, 654 bp, Neisseria meningitidis
atgaagataacgcactgcaaattaaagaaaaaagtacagaaagaactgctccgtttttttgtactcgaagttaccgcccgttctgccgccgatattttgggtatccatcccaattcggcagcactgttctaccgtaaaatccgcacggttatcaaccatcatttggccttggctgccgatgaggtttttgagggccctgtcgagccggacgaaagcgatttcggcggacggcgtaaaggcagacgtggtcgcggtgcggcaggaaaagtggttgtcttcggcattctgaaacgcaacggacgggtctataccgttgtcgtaaacaatgccaagtctgaaacgttactccctgtcatcaaaaagaaaatcatgccggacagtattgtttataccgatagtctgagcagctgcgacaagttggacgtgagcggttttatccattaccgcatcaaccattccaaggagtgtgcagaccgtcagaaccacattaacggcattgagaacttttggaatcaggcaaaacgcgtcttgcgaaaatacaacggaatcgatcgtaaatctttcccgctgttcttgaaagaatgcgaatttcgatttaacttcggcacaccgtctcaacagcttaaaatcctgcgggattggtgtggaatttag

SEQ ID NO: 70816 - DNA, 1158 bp, Neisseria meningitidis; identical to SEQ ID NO: 53801

SEQ ID NO: 70817 - DNA, 894 bp, Neisseria meningitidis
atgattattgtcatgagcaggcgtgccgccgaagcggacattgccggcgttgtcgcctttatccgcagcagaggtctgcgagaacacatttctcacggcgacgagcgtaccgtcatcggcgcaatcggcgacgatagggttttgagcgtcagggaggtgcagacgctgccggaggtcgagaaagccgtccgcattttggatacatggaaaaccgtcagtcgggaaaatcgggcggaagacagccgcgttgccgccaaaggcgtggctttcggcggcggggaaaccgtccgtatcgccgcagaaccgtcagtatggcgcaatgcggatgcagtgtttctagatccgtttttcacttcggcaaacttatacgacacttcaagtgcggatgaagggcggggacggtgcagacggttggcggaacagaccgcatcggcgcatgatgcagggaaacccgtattggtgcgcgtccgcaacgtccgccatgtcgaagcggctttgaatgcgggggcggacatcctgtatttgggcggcgggctgatgtccgatcttgccgtattgaatgaagccggaagcctgaacattcccttggtgctgtgtaaagacaagcaccattctgccgaagattggttgaatgccgcagaatatgtcgtctcgcgcggcaaccgccacctgattctgggcgagtcgggcgtgttgagccataccaaagaccatccctaccgtttggatgtcgaatccatcgtgaaagtccgccaaatcagccatctgcccgtgattgcgaatattacgggattatggaaccgcgatatgccgcaggaaatcctgtacggcttggcaaaggcggcaggcgcgtgcggaatcgtcggaacctgttttgaaaagtcgggcggatag

SEQ ID NO: 70818 - DNA, 1635 bp, Neisseria meningitidis
atgataaaaccgaacctgaggccgaagctcggctcttccgcgctgattgccttcctttccctgtattcctcgctggtattgaattacgccttttttgccaaagttgtcgagcttcatccttttaacggcaccggggcggatatcttcctctatacgatgccggtggtgctgttttttttaagtaatttcgtttttcacgtcattgccctgcctttcgtgcataaggtattgattccgttgatattggttatcagtgcggcggtgtcttaccaagaaatatttttcaatatctatttcaacaagtcgatgttgaataatgtcttgcaaactacggctgccgaaagcgcgcgcctgattacgccgggctatgtgctgtggattgtatgtttgggcgtattgcccgcgctggcgtatatcgccgtcaaggttaaataccgcgtttggtataaggagtttttgacgcgccttgtgcttgccgccgtttcctttttgtgcgcgttgggcatcgcaatgttgcaatatcaggattacgcctcgtttttccgcaacaataaatcagtaacccatctgattgtgccgtctaatttcatcggcgcgggcgtgtcgaaatacaaagattggaagcgttccaatattccttatacgcaattggatatggcggtcgtgcaaaaccggccggccggcagcctgcgccgtttcgtggtgctggtcgtgggcgagaccacgcgtgccgccaactggggtttgaacggttacagccgccaaactacgccgctgcttgccgcgcgcggcgatgaaattgtcaatttcccgcaggtcagaagctgcggcacatcgaccgcgcactccctgccgtgtatgttctcaaccttcgaccgcacggattatgacgaaatcaaagccgaacaccaagacaacctgctggacatcgtgcagcgcgccggcgtggaagttacctggttggaaaacgattccggctgcaagggcgtgtgcggcaaagtgccgaataccgacgttacctcgctcaacctgcccgaatactgccgcaacggcgagtgtctcgacaatatcctgctgactaagttcgacgaagtcctcaacaaaaacgataaagacgcggttttaatcctgcataccatcggcagccacgggccgacgtattacgaacgctataccgaagccgaacgcaaattcacgccgacctgcgacaccaacgaaatcaacaaatgcacccgcgccacgctggtcaacacttacgacaatacggttttgtatgtggaccagtttatcgacaaggttatccgcaaacttgaaaaccgcgacgatttggaaagcgtggtgcattatgtttccgaccacggcgaaagtttgggcgaaaacgggatgtacctgcacgccgcgccttacgccatcgcgccttccgggcagacgcatatcccgatggttatgtggttttccaaagccttccgccaacacgggggcatagatttccaatgcctcaaacaaaaagcggcggaaaacgaatattcgcacgaccactatttcagcacggtattggggctgatggacatttccaatagccaaacctatcggaaggaaatggatatattggcagcctgccgccgtccgcgctga

SEQ ID NO: 70819 - DNA, 822 bp, Neisseria meningitidis
gtgaaccgaactgccttctgctgcctttctttgaccgccgccctgattctgaccgcctgcagcagcggaggcggcggtgtcgccgccgacatcggcgcggggcttgccgatgcactaaccgcaccgctcgaccataaagacaaaagtttgcagtctttgacgctggatcagtccgtcaggaaaaacgagaaactgaagctggcggcacaaggtgcggaaaaaacttatggaaacggcgacagcctcaatacgggcaaattgaagaacgacaaggtcagccgcttcgactttatccgtcaaatcgaagtggacgggcagctcattaccttggagagcggagagttccaaatatacaaacaggaccactccgccgtcgttgccctacagattgaaaaaatcaacaaccccgacaaaatcgacagcctgataaaccaacgctccttccttgtcagcggtttgggtggagaacataccgccttcaaccaactgcccagcggcaaagccgagtatcacggcaaagcattcagctccgacgatgctggcggaaaactgacctataccatagatttcgccgccaaacagggacacggcaaaatcgaacacttgaaaacacccgagcaaaatgtcgagcttgcctccgccgaactcaaagcagatgaaaaatcacacgccgtcattttgggcgacacgcgctacggcggcgaagaaaaaggcacttaccacctcgcccttttcggcgaccgcgcccaagaaatcgccggctcggcaaccgtgaagataagggaaaaggttcacgaaatcggcatcgccggcaaacagtag

SEQ ID NO: 70820 - DNA, 225 bp, Neisseria meningitidis; identical to SEQ ID NO: 36979

SEQ ID NO: 70821 - DNA, 648 bp, Neisseria meningitidis; identical to SEQ ID NO: 54477

SEQ ID NO: 70822 - DNA, 1380 bp, Neisseria meningitidis
atgtttgctttcaaatccttactcgatatgccgcgcggtgaggcacttgccgtcgtcgtcgctctgattgccgcgatgggctataccatcatttcattggagtggctgccgcatatgtccattattgccgccatcgtcgtgctgattttgtacggcttggtgcgcggtttgaaatacaacgatatgcagcagggcatgataggcgcgttgaatcagggtatgggcgcgatttacctgtttttcttcatcgggctgatggtcagcgcgctgatgatgagcggcgcgattccgacgctgatgtattacggtttcgggctgatttccccgacttatttttatttttccgctttcgcgctgtgttccgtcatcggcgtgtccatcggcagcagcctgaccacctgcgccaccgtcggcgttgcctttatggggatggcggcggcgtttcatgccgatatggcgatgacggcgggcgcgattgtttcgggcgcattttttggcgacaaaatgtccccgctttccgacaccacgggcatttccgcgtccatcgtcggcatcgacttgtttgagcacatcaaaaatatgatgtacaccaccatccccgcgtggctcattagtgcggcactgatgctttggcttttgccgaatgtcgccgcgcaggatttgaacggcgtcgaatccttccgcagccagcttgaagccacgggattggtgcacggctattcgctgattccgtttgcactgttggtcgttttggcattgatgcgcgtcaatgccgtggtcgccatgctctttaccgtcattgccgccgttgccgtaacgtatctgcacagcacgcccgatctgcgtcagctcggcgcgtggttttacggcggttacaaactcgaaggcgaagcgtttaaagatgttgccaaactgatttcgcgcggcggtttggaaagtatgtttttcacgcaaaccatcgtgattctcgggatgagtttgggtggactgctgtttgcgctgggcgcgattccttccctgctggatgccgtccgcagctttttgacgaatgccggacgcgcgacgttcagtgttgccatgacttcggtcggggtcaatttcctgattggcgaacaatatttgagcatcctgctttcgggagaaacgttcaaacccgtttacgacaggctcggactacattcccgcaacctctcgcgtacgctcgaagacgcgggtacggtcatcaacccgcttgttccgtggagcgtgtgcggcgtatttatcagccacgcgctgggtgtgccggtgtgggaatatctgccgtatgcctttttctgctatttgagtttggcactgacgcttctgttcggctggacggggctgactttgagcaaaaaataa

SEQ ID NO: 70823 - DNA, 1782 bp, Neisseria meningitidis
atgccttatttcgccctgtttgacgatgccgtaagcggccgcgcaaaacgctatcaaaatcatgtggaaagccgttttttccgtcccgaagaactcgatgctttggacggcgcgctgcaatcgggctggcaaaaagggctgcatgccgtgttgtttgcagactacggattcggtttgccgctgacgggggtcgagtccgaacgcggcggcaaccttgccctgcactggtttgccgactgcgccgacaccgatgccgcaagctggcttgcccgacactcagacggcctccccgccggcatttccacgccgcaatcctccgtatccgaagccgattacctcgaccatatccgccaaatccacgaagccatccgacgcggcgacacctatcaaatcaactacactacccgcctgcacctgcaagcctacggcaatcccgtcaaactttaccaacgcctgcgccagcccgtcccctatgccgttttgtcccacctgcccgatgcacaagggcaatccgcgtggacgctgtgtttctcgcccgaactcttcctcaaaatcggttcggacggcaccatcagcaccgaaccgatgaaaggcaccgcgccgattttgggcgacggacaagacgaacgccgcgccgccgagttgcaagcagacccgaaaaaccgcgccgaaaacgtgatgattgtcgatttgctgcgtaacgatctcggcaaaatcgcccaaaccggcacagtatgcgtacccgaaccgtttaaagtatcgcgtttcggcagcgtttggcagatgaccagcaccatccaagcccaagccttgccgcacacctcgttcgccgacatcctccgcgccgccttcccctgcggcagcatcaccggtgcgcccaaaaaaatgagtatgcagattatcgaatcgctcgaagccgaaccgcgcggactttatacgggcagcatcggctatttgaacccgagttccggcggcttggggtttgaaggcgcgttcaacgtcgtcatccgcaccttatcgctcacgccgctttcagacggcatttatcaaggcgtgtacggtgtcggttccggcatcgtcatcgacagcgaccctgccgccgaatatcgggaatgcggctggaaagcccgtttcctcaacgaattgcgccccgacttcggcatttttgaaaccctgcgcgtggaaaacaggcaatgcgccctgctcgaccgccacctatgccgtctgaaaacctccgcccaagccctcaacctgcccctgcccgacggttgcgaaaatcaaatcaaacaatacatcgcccatttgcccgacggcgtgttccgcgtcaaagcccggctcgcttcagacggcatcagcctgtcccgcgccgttttaaaccgtctgaccgacaaacaacgcgtcatcatttcgcccgccgtcctgcccgcacaaaactacctgcgccgcttcaaaaccacacaccgcgccctcttcgaccaagcgtggcaaaccgccgaaacacaaggcgcgttcgacagcctgtttttcaattcagacggcatcctgctcgaaggcggcagaagcaacgtgttcgtcaaacatcgcggacaatggctcacgccctctttagatttagacattttaaacggcataatgcgccaagccgtgttggacgaaccgcaaaaatatttgcaaacaaatcaagtaatcgaaacacacatcacacaaaaaacactgcaagaagccgaagaaatccgcctctccaacgccttgcgcggcgtatttgccgccgcccttgcctga

SEQ ID NO: 70824 - DNA, 1773 bp, Neisseria meningitidis
atgatactgccagcccgtttttcagacggcatcagcctttccctacgcctgaaactcctgaccggagtgtgggtcgggttggcggcattgtctgtcgtcttgacactgctgctctctttgcgtctggaaaacgcggcctccgtcatcgaagaggcgggcaacttgagaatgcaggcataccgtctggcatacatggcgggtgaaggatctccccgctcccaaatagacaatcaggttgacgaatttgaaaaaagcctgaatcgtatttcacaaagtgatgccatccatccgctgattccttcggacacccctcttgcttatgatttgatacaatccatgctgattatagattggcaggcacacatcctccccccgctccagtcctaccggcgaccgactcaggtcgatctctaccgctttgccggaaacatcgaactgtttttgcaggcattggaaaatgccaacgaaaaaaacacatggtggctcaggcgttttcaatgggcaattatgttgatgacgctggtgtcgtctgtactgatgctgttttggcaccagatttgggttatccggccgctgcaggcgttaagggaaggtgcggaacgcatcggacggaggtgtttcgatattccggttcccgaaggcggtacgccggaattcaaacaggtcgggcgttgtttcaatcaaatgggcggcaggttgaaaattttatatgatgatttggaaggacaagtcgccgagcagacacgcagtctcgaaaaacaaaatcaaaacctgaccctgctgtaccaaactacacgggacctgcaccaatcctacataccgcaacaggctgcagaacattttctaaaccgtatcctgcccgccgtaggagcagattccggcagagtttgtttggacggcggatccgatgtttatgtttccattcatcatgcggattgcggcacagcagcttcggatttggggaagtaccatgaggaaatcttccccattgagtaccagaacgaaacattgggcaggctgttgctcagctttccaaacggcatttctcttgatgaagacgaccgcatcctgcttcaaacactaggcaggcaattgggcgtatcgcttgccggcgcaaaacaggaggaagaaaaacgcctgcttgcagtattgcaggaacgcaacctgattgcgcaaggattacatgacagcatcgcacaagcattaacgttcctaaacctacaggtacagatgctggaaaccgcctttgccgaaaacaaacgggaggaagccgcagaaaacatcggcttcatcaaaacaggcgtgcaggaatgttatgaagatgtccgcgaactgctgctcaacttccgtaccaaaatcagcaataaagaatttcccgaagccgttgccgacctattcgcccgctttacgcaacaaaccgggataacggtcgaaaccgcctgggaaaacggttcgttcctgccgcctcaggaagcgcagctccaaatgatttttatcctgcaggaaagcctgtccaacatccgcaaacacgcccgcgccacccatgtaaaattcaccctttccgaacacggcggacgctttaccatgaccatccaagacaacggacaaggtttcgacacggagaaaataggagaacctacgggcagccatgtcggactgcacatcatgcaggagcgtgccaagcgcatccatgccgttttagaaatccgttcccaaccccaacagggaaccaccgtctcattgacgggtgcatctgaagaaagcttgaaatga

SEQ ID NO: 70825 - DNA, 1509 bp, Neisseria meningitidis
atgcaaaccgattgcgacgtattgattgccggaaacgggctggcggcactgacgctcgccctgtcgctgcctgaatcgttccgcatcgtcattttgtgcaaaaaccggctggacgacaccgccagccgtcatgcccaaggcgggattgcagcggcgtggtcgggagaggacgacatcgaaaaacacgttgccgataccttggaggcgggcgcgggtttgtgcgacgaagccgccgtccgcaccatcctgtcgcagggcaaaccggcaatcgaatggctgctggcgcagggtgtggcgttcgaccggaatcataacgacctgcacctgacgcgcgaaggtgggcacacttgccgccgaatcgcccacgtcgccgactacacgggcgaagccgtcatgcaaaacctaattgcccaaatacaccgccgcccgaacatccgcgtttgcgagcggcagatggcgttggacattcaaaccgaatcaagcgcggcgtgcggactgaccgtcctcaactgccgaacgcaagaaacctaccgcatccgcgcccgccataccgtactcgcaggcggcggcctcgggcaaatttacgccgccaccactacgccgcccgaatgcacgggcgacgccatcgccatggcgatacgcgcaggttgtacagtcgaaaacctcgaatttatccaattccaccccacaggcttggcaaggccgtctgaaaacggacgcacctttctgatttccgaagccgtgcgcggcgaaggcggcatcctgagtaaccaagcaggcgagcggtttatgccgcattacgaccgccgcgccgaacttgcgccgcgcgacatcgttgcccgcgccatcgctgccgaaatcgccaaacaaacgcaagacttcgtctcgctcgacatcagccgccaacccgcagagttcgtccgtcagcatttcccatccatccatcggtactgcctgtcccaatgcggcttggacattacgcgccaagccatccccgtccgccccgtacaacactacacctgcggcggaatccaaaccgaccccagcggcagaacctccctgccacaactctacgccttaggcgaaaccgcctgcacagggctgcacggagccaaccgcctcgccagcaactccctgctcgaatgcgtcgttaccgctcggcttgccgcccaaaccatcgcggacgggcaagcgttccaagccgtaccgccccaaaggccgtctgaaagcctctcctccgaagcaggcatcttttcagacggcatccaaagcgcattcagccgccccgtcctgcaagccttcaaccaacgccatctgggcatcctacgcaacgataccggcctgcgccgcgccattgcccaactgcagctttggaagcaaaaccaaaccgagccgcacaccgcgtccgaatacgaaaaccgtaacctgctcgaatgcagcctcgccgtcgcccaagccgcatacgcaaggcggcaaaacatcggcgcgcattttaatagtgattgttaa

SEQ ID NO: 70826 - DNA, 957 bp, Neisseria meningitidis; identical to SEQ ID NO: 48676

SEQ ID NO: 70827 - DNA, 963 bp, Neisseria meningitidis; identical to SEQ ID NO: 55174

SEQ ID NO: 70828 - DNA, 1170 bp, Neisseria meningitidis; identical to SEQ ID NO: 61562

SEQ ID NO: 70829 - DNA, 687 bp, Neisseria meningitidis
atggaaacctttaaagacagactggtttttttatggaaaagcgaagcgaagcaggcaaaaatcgcatccgatattgaaatgacgattgcgggcttcagcaggatatggaatgaaggcggtctgccgaagtctgaaacattgaaaaaaatcaagcagttgaaggggtgtagtatcgattggctgctgaccggggagggtaatccgtttccggatgaagccccaaaaaaatcccttgcttacgataccttgggcaatgaagttgatacggacgagtttgtctttgtgccgagatatgatattcgggcggctgcgggatacgggcagtttgtcgatcatgaggaaccggtatttacaatggcgttcagacggcattggattgagaattatattacccgcgatacgaaaaacctgtctgtaatttccgtcaagggggattcgatggagggggttttgaatgacggcgattcgattttggtcaatcatggggaaaatacgccgagggacggtctgtatgtgttgcggattaatgaaaatctgctggttaaacgtttacagattgtgccgggcgggattatcaatgtaatttctgcaaacgaggcttatcctgcttttgaaatcaatttgaacgatttgaccgatgatgtggagattatcgggcgtgtcgagtggttcggcaggacgatttga

SEQ ID NO: 70830 - DNA, 1293 bp, Neisseria meningitidis
atggctgtcttcccactttcggcaaaacatcggaaatacgcgctgcgcgcgcttgccgtttcgattattttggtgtcggcggcatacattgctttgacagagaggacggaacgcgtcagaccgcagcgcgtggaacaaaatctgccgccgctgtcttggggcggcagcggcgttcagacggcatattgggtgcaggaggcggtgcagccgggcgactcgctggcggacgtgctggcgcgttcgggtatggcgcgggacgagattgcccgaatcacggaaaaatatggcggcgaagccgatttgcggcatttgcgtgccgaccagtcggttcatgttttggtcggcggcgacggcggcgcgcgcgaagtacagttttttaccgacgaagacggcgagcgcaatctggtcgctttggaaaagaaaggcggcatatggcggcggtcggcttctgaggcggatatgaaggttttgccgacgctgcgttcggtcgtggtcaaaacgtcggcgcgcggttcgctggcgcgggcggaagtgcccgtcgaaatccgcgaatccttaagcgggattttcgccggccgcttcagccttgacggtttgaaggaaggcgatgccgtgcgcctgatgtacgacagcctgtatttccacgggcagcaggtggcggcgggcgatattttggcggctgaagtcgttaagggcggcacaaggcatcaggcattctattaccgttcggacaaggaaggcggagggggcggcaattattatgatgaagacggcagggtgttgcaggaaaaaggcggcttcaacatcgagccgctggtctatacgcgcatttcttcgccgttcggctaccgtatgcaccccatcctgcacacatggcggctgcacacgggcatcgattatgccgcaccgcagggaacgccggtcagggcttccgccgacggcgtgattacctttaaaggccggaagggcggatacggcaacgcggtgatgatacgccacgccaacggcgtggaaacgctgtacgcgcacttgagcgcgttttcgcaggcacaaggcaatgtgcgcggcggcgaggtcatcggttttgtcggttcgaccgggcgttcgaccgggccgcacctgcattacgaggcgcgcatcaacgggcagcccgttaatcctgtttcagtcgcattgccgacacccgaattgacgcaggcggacaaggcggcgtttgccgcgcagaaacagaaggcggacgcgctgcttgcgcgcttgcgcggcataccggttaccgtgtcgcaatcggattga

SEQ ID NO: 70831 - DNA, 876 bp, Neisseria meningitidis
atgagcaatgaagttgaagtgatggatgcggtttcagtgcaaaactaccaagtcgcgcacagcgtgatggtgatggagcaatggggtaacggcgaggtttacaacgaagccacttggatcgaacgcggccgcttggcggtacggcagacgatggaaggcatgtttgaattggggcgcgcacttattgtactgaaagagcatacagaacacgggcgatttatggaaattgtaaaaggtcaatttggtatcggccataacgaaaccgcccgattgatgtctgctacccaacgtttcgccacgccgcaaatgcagaaagccgcgccgaagctgatggatttgggcaagtcaaagctgctggaactcttggtcgaagaagacgttacgttggtgggacttgccgaaggagaagaagtcaacggcatgacctttgacgatgtggaccgaatgacggtgcgcgagctgcgcgtcgccctgcgcgaaagccgcgaaaacctcgccgccaaagacgaagtgatgaaaaccaaaacagccaaaattgatgagctggccgagaagctggctaagaagcaaaccgttgtcagagagccgaaggcggaagacgtaggcagcgagttggcgatgcagttaacaagccttgaggtcggtatccgcagtcaagtgagccgtctgaaagatttgttcgaccaacttaatgcgcacagtgaggcacacgggatcagccatcaggcaaagatggtcggcacgctcaatcaaattattttggactgcgagcaactgcgcgaaagctatgccctgccgactgaagcaccgacagacaatgtgccggaatggttgggcggtgaaacgggagaaggcgatgaatccggcaatgattga

SEQ ID NO: 70832 - DNA, 2790 bp, Neisseria meningitidis
atgaccgattacagcaaaaccgtcaacctgctcgaaagcccgttcccgatgcgcggcaatcttgccaagcgcgagcctgcatggctgaaaagctggtacgagcaaaaacgctaccaaaaactgcgcgaaatcgccaaaggccgtccgaaattcatcctgcacgacggcccgccgtatgccaacggcgacatccacatcggtcatgccgtcaataaaattctcaaagacatcattatccgcagcaaaacccaagccggttttgacgcgccttatgtgccgggttgggactgccacggtttgcccatcgaagtgatggtagaaaaactgcacggcaaagacatgcctaaagcgcgtttccgtgaattgtgccgcgaatatgccgccgaacaagttgcccgccagaaaaaagactttatccgcttgggcgtgttgggcgactgggaccatccttacctgactatggatttcaaaaccgaagccgataccgtgcgtatgctcggcgaaatctacaaatccggctatctctaccggggtgcgaaaccggttcaattctgcttggactgcggttcttcgctggccgaagcggaagtggaatacaaagacaaagtatcgcctgcgattgacgtgggctatccgtttaaagacaccgctgcgcttgccactgcattcggtttggcaggtatcgaaggcaaagcgtttgccgttatctggacaaccacgccttggacgctgccggcgagccaagccgtgtctgccggtgcggacgtggtgtatcaattaatcgatacgcctacaggcaaattggtgctggcgaaagatttggcagaagacgcgctcaaacgttacggtttttcagacggcattgctattcttgccgaaaccaccggcgacaagctggaaaacctgcacatgaatcatccgttcctcgagcgtgatattcccatgctcaacggcgaacacgttaccaccgacgccggtacgggtttggtacataccgcccctgcgcatggtttggaagactacgctgtctgcaataaatatggcatcgagctttacaaccccgtcaacgccgaaggcaaatacatcagcgaaacgccgcgcgttgccggtatgcgcgtttgggaagccaatcccgttatcctgcaatggctggaagaaaccggcaaccttttggcaagcagtaaaatcgaacacagctacgcccactgctggcggcacaaaacgccgctgatttaccgcgcgaccggtcaatggtttgtcggtatggacaaagccggtgccgacggcaaaaccctgcgcgacaaagccatcaaggccgtggacgataccgaattcttcccgtcttggggtcgcgcgcgtttggaagccatgattgaaggtcgtcctgactgggtggtttcacgccaacgctattggggcacgccgatgactttctttgttcacaaagaaacgggcgagctgcatccgaactctgccgaacttttggaaaaagtcgcgcaacgcattgaagaaaaaggcatcgaggcttggttctccctcgataaaagcgaattattaagcgcggaagattgcgaacattacgacaaactccccgatacgatggacgtatggttcgattccggttcgacccattattccgttgtgaaacaacgcgaagaattggaatggccggcggatttgtatctcgaaggcagcgaccagcaccggggctggtttcaatcgtccatgctgaccggctgcgcctcatcaatgggacgcgcaccgtataaacagctgctgacccacggttttgttgtagacggcgaaggcaaaaaaatgtcgaaatccatcggcaacgtcgtcgcgccgcaagaagtctataacgaattcggcgcggacatcctgcgtctgtgggcggcatctaccgattacagcggcgaattggcgatttctaaagaaatccttaagcgcgtaaccgaaagctaccgccgtatccgcaataccttgagctttttgtttgccaacttgagcgactttaatccgattgaagatgccgtgcaacaggcggatatggtggaaatcgaccgctatgccctggtgttggcgcgtcggctgcaagagcgtctggcaggcgattactatccgcgttatgccttccattttgccgtgaaagacattgtttctttctgctcggaagacttgggcgcgttctacctcgatatcctgaaagaccgcctctacaccaccaaagccgacagccgcgcccgccgcagcgcgcaaaccgccctgtaccacatcacgcgcagcctggttctcttgattgcaccgattttgtgctttaccggcgaagaagcgtgggacatcatcggcggcggcgaagaagacagcgtcctcttccatacttggcacgagttcccgaccatcaacgaaaaaaccgaagccgaactggtgaaaaaatggacggcaatccgcgaagcccgcgaagcggtaaccgccgccatcgagcctttgcgcgccgacaaaaccgtcggttcgtccttgcaagccgaagccgaaatcaccgcgccggaagaaatggccggctacctgaacgccttgggcgaagaattgcgctttgccatgctggtgtctaaagcagaagtgaaagtaggcagcgaacttgccgttgccgctaaagccagtgatggtgaaaaatgcgaacgctgctggcactacacccgcgatgtgggcgcggttgcaggctatgaaaccgtctgcaaacgctgtgcagagaatgtcggcggagaaggcgaaacgcgccattacgcctga

SEQ ID NO: 70833 - DNA, 420 bp, Neisseria meningitidis
  misc_feature 401, 402, 403, 404, 405: 'n' is a, c, g or t
gtggacagcggcggcaggatcgaagccctgattgagcgcgtgttggacaaccataccgcactggcgcacatccgttcgtccaagtcccccaagcccggtatggggctggtgtttgaaggcggcatccgtgccgtgatggtcgggcgtgagggcgaactgttctgcctgcgttttgaaggcggtcaaaccgtttacgaacttttggaacagaacggacacctgcccctgccgccttatatcgaacgcgccgccgacgcggacgacgacagccgttatcaaaccgtttatgccaaatatcagggtgcggtcgccgcgccgacggcgggtctgcattttacggaagaacttttgcgccgcctgaaagacaaacgcgcagtaaccgcagaagtaaccctgcacgnnnnncacacacttaattaa

SEQ ID NO: 70834 - DNA, 738 bp, Neisseria meningitidis
  misc_feature 8, 9, 10, 11, 12: 'n' is a, c, g or t
gtgtgtgnnnnnctgccgtcctcgctgcccgacgatgaagtggtgctgtttgcccagcaaaaacgccgtgctcagacgggcggcgattttatgcagcatcatcttcatcaggttgtggcgatttcgtgctgcatgcgttgggggcaggataaagtacatgtcggcaccatcggcgagatggatgacggcgaggaagtggtcattgctaaatttttcgaattgattgaaaaacatacgccgcaactggtcagttggaacggcggcggtttcgacctgccggttctgcattaccgttcgctgctacacggcatcaacgccgcgcgctattgggatatgggcgacggcgatttcggcgacagccgcgatttcaagtggaacaactacatcagccgttaccaccaacgccactgcgatttgatggatttgctcgcactttatcagccgagggcaaacgtgccgctggacgatatggcgaaactgtgcggttttccgggcaagctgggtatggacggcagcaaggtgtgggatgcgttccacgcgggcaggctgaaagaaatccgcaattattgcgaaaccgatgccgtgaatacgtatttgatgtatctgcgtttttgtctggtcagcggcagattcgacgcggacgaatacgaaatggaaatcaagcggatcagaaactatctttccgcccaaacagaagacaaaccgcattgggcagaatttgtccaagcgtggaaatag

SEQ ID NO: 70835 - DNA, 2016 bp, Neisseria meningitidis; identical to SEQ ID NO: 55657

SEQ ID NO: 70836 - DNA, 780 bp, Neisseria meningitidis; identical to SEQ ID NO: 60592

SEQ ID NO: 70837 - DNA, 756 bp, Neisseria meningitidis; identical to SEQ ID NO: 54580

SEQ ID NO: 70838 - DNA, 1014 bp, Neisseria meningitidis; identical to SEQ ID NO: 63107

SEQ ID NO: 70839 - DNA, 150 bp, Neisseria meningitidis; identical to SEQ ID NO: 41322

SEQ ID NO: 70840 - DNA, 792 bp, Neisseria meningitidis; identical to SEQ ID NO: 60465

SEQ ID NO: 70841 - DNA, 291 bp, Neisseria meningitidis; identical to SEQ ID NO: 42259

SEQ ID NO: 70842 - DNA, 300 bp, Neisseria meningitidis; identical to SEQ ID NO: 45673

SEQ ID NO: 70843 - DNA, 480 bp, Neisseria meningitidis
atggctaacttagtaaaaacctttctgctcggcgaactcgtcaaaggcttgggcgtaacgctcaaaaacttttttgcccgcaaagacacgatttattttcccgaagagaaaacgccgcaatccgtgcgtttccgcggcctgcacgcgcagcggcggtatccgaacggtgaggaacgctgcattgcgtgtaagttgtgcgaggcggtgtgtccggcaatggcgatcaatatcgaatcggaagaacgcgaagacggcacccgccgcaccaagcgttacgacatcgacctgaccaagtgcatcttctgcggtttctgcgaagaggcttgcccgaccgatgcgattgtggaaacgcacatttttgaataccacggcgagaaaaaaggcgacttgcacatgaccaagcccatcctcttggcaatcggcgacaaatacgaagccgaaatcgccaagcgcaaagccgctgacgcgccgtaccgttaa

SEQ ID NO: 70844 - DNA, 498 bp, Neisseria meningitidis; identical to SEQ ID NO: 55418

SEQ ID NO: 70845 - DNA, 1806 bp, Neisseria meningitidis
atgctgaaagcttattctgccgccgaaactaaagaagcacagttggcattgttagataatttgattcacaaatgggcggaaaccgattcgaactggggcaaaaaatcgccaatgcgactttcaaccgattggacgcaaacggctaatgaaggtattgcactgacaccatcccaagtagcacaactaaaaaagaacgctttagtttccctttctgataaagctaaagcaactattgacgccgcccgcgaccgcattgccgtgcttgatgcctacacggggcaggattccaacacactctattacatgagcgaggaagatgcgcttaatatcgtcaaagtaaccaacgatacatacgaccatctcgccaaaaacatctaccaaaacctgttattccaaacccgtttgcagccatatttgaatcaaatcagtttcaaaatggaaaatgatacgttcactttggattttagtggtcttgttcaagcatttaaccatgtcaaagaaactaatccgcaaaaagcttttgtggatttggccgagatgcttgcatatggcgaacttcgttcttggtatgaaggccgaagactaatggccgattatgtggaggaggcaaaaaaagcaggtaaatttgaagattaccagaaagtgttgggtcaggagaccgttgcattattagctaaaacatcgggtacgcaagcagatgatatcctgcaaaatgtaggctttggtcataataaaaatgtttctttatatggtaatgacggcaacgacactctgatcggcggtgcaggcaatgattacttggagggcggcagcggttcggatacttatgtcttcggcaaaggcttcggtcaggatacggtctataattacgactacgctaccggacgcaaagacatcatccgctttaccgacggtattacagccgatatgctgacttttacccgagagggcaaccatcttcttatcaaggcaaaagacggcagtggacaagtgactgttcagtcctatttccagaacgatggctcaggtgcttaccgtatcgatgagattcatttcgataacggcaaagtactggatgttgccactgtcaaaaaactggtacagcaatccaccgacggttcggacagattgtatgcctaccaatccggaagtaccttaaatggcggattgggcgatgactatctgtacggtgccgacgggaatgacctgctgaatggtgatgcaggcaacgacagtatctacagtggcaatggcaatgatacgctcaatggaggagaaggcaacgacgccctgtacggctataatggtaacgatgcactgaatggtggcgaaggcaatgatcatttgaacggcgaagacggtaacgacactctgatcggcggtgccggtaatgattacttggagggcggcagcggttcggatacttatgtcttcggcgaaggcttcggtcaggatacggtctataattaccatgtggataaaaactctgacactatgcactttaaaggatttaaagcagcagatgttcattttatccgttccggaagtgatttggtgcttagcgcttctgaacaagacaacgtacgtatttccggattcttctatggtgaaaaccatcgtgtagatacatttgtctttgatgatgcagctatcagtaatccagattttgccaagtatattaatgctggcaataatttggtacagtctatgtctgtgttcggttctaatactgctgcgacaggaggaaatgtggatgccaatacacaatccgtacagcagccgttattggtaacgccatctgcataa

SEQ ID NO: 70846 - DNA, 1179 bp, Neisseria meningitidis
atgacaggcagaacaggcggcaacggcagtacccaagcgcaacccgaacgcgtcatgctggtgggcgtaatgttggacaaagatggtacgggcagtagtgccgcccgtctgaacggttttcagacggcattggcggaagctgtcgagctggtcaaagcggcgggcggcgattccgtgcgcgtggagactgccaaacgcgaccgtccgcacaccgcgctgtttgtcggcacgggcaaggcggcggagctgtcagaagcagttgccgcagacggcatcgatttggtcgtattcaaccacgaactcacgcccacgcaggaacgcaaccttgaaaaagaactgaaatgccgcgtattggacagggtagggctgattctggcgattttcgctcgccgcgcccgcacgcaggaaggcaggctgcaagtcgagttggcgcaattgagccatttggcgggacgcttgatacgcggttacggccatctgcagagccagcgcggcggtatcggcatgaaaggccccggcgaaaccaaactggaaaccgaccgccgattgatcgcccatcggatcaatgccttgaaaaaacagcttgccaacctcaaaaaacagcgcgccctgcgccgcaagtcccgcgaatcgggcacaatcaaaacgtttgcgctggtcggctataccaatgtcggcaaatccagcctgttcaaccggctgaccaagtcgggcatatatgcgaaagaccagcttttcgccacactcgacacgacggcgcggcggctgtacatcagtcccgaatgcagcattatcctgaccgataccgtcggattcgtcagcgatctgccgcacaaactgatttccgccttttccgccacgctggaagaaaccgcgcaagccgatgtgctgctgcatgtcgtcgatgccgccgctccgaacagcggacagcagattgaagacgtggaaaacgtactgcaagaaatccatgccggcgatattccgtgcatcaaggtgtacaacaaaaccgacctgctgccgtctgaagaacaaaacacgggcatatggcgcgacgctgcgggaaaaattgccgccgtccgcatttccgttgctgaaaataccggtatagacgcactgcgcgaagccattgccgagtcttgtgccgccgcaccaaacacagacgaaaccgaaatgccatga

SEQ ID NO: 70847 - DNA, 1134 bp, Neisseria meningitidis
atgtcatacagcacctttcccaaaaccaaaaacgacgcgctgaatgagccgatgtttttcggtcagcctgtgaatgtcgcccgttatgaccagcagaaatacgaggtatttgaaaaactgattgaaaaacaattgtcgtttttttggcggccggaagaaatcgacgtgtcgcgcgaccgtatcgactacgccaacctgccggaacacgaaaaacatattttcatcagcaatctgaaatatcaaacactgctcgattccatccaagggcgcagtccgaatgttgccttgctgcctttggtttcgattcccgagttggaaacgtggattgaaacgtggagcttcagcgaaaccatacactcgcgcagctatacccacatcatccgcaatattgtgaatgatccgtcggtcgtgtttgatgatattgtcgaaaacgaatacattaccgcccgcgccgaagacattgcctgctattacgatgacttaatcgaatacacccagtattacaacctgttgggcgaagggatgcataatgtcggcggaaaacccattactgtgtctttgcgcgggttgaagaaaaaactctatctctgcctgatgtgcgtcaacgtgttggaagccatccgtttctacgtttcattcgcctgctcgtttgcttttgccgagcgcgagttgatggaaggcaacgccaaaatcatcaaactgattgcccgcgacgaagccctgcacctgaccggcacgcagcatatgcttaatctgatgcgttcgggtgttgatgattctgaaatggcagaaattgctgccgagttgcaggacgaatgtttccaactcttcaaaaaagcggcggaacaggaaaaagaatgggcggcatatttgtttaaagacggttcgatgattggtttgaacaaagaaatcttatcccaatacgtcgaatatattaccaatctgcgtatgcaggcggtggggttgccggccggatttgaaggcgcaaatcaaaacccgattccgtggattaatgcgtggctgtcgtccgacaacgtacaggtcgcgccgcaggaagtggaaatatcctcttatttgatcggtcagatcgattctgaagtgaatacggatgatttgggcgattttgagttgtaa

SEQ ID NO: 70848 - DNA, 627 bp, Neisseria meningitidis
  misc_feature 4, 5, 6, 7, 8: 'n' is a, c, g or t
gtgnnnnngggcgtgtttctgcttgccgtcctgcccgtgctgctcgccattaccgtcagggaggtggcgcgcggctatacggcgcgctactggggagacaacactgccgaacaatacggcaggctgacactgaaccccctgccccatatcgatttggtcggcacaatcatcgtaccgctgcttactttgatgttcacgcccttcctgttcggctgggcgcgtccgattcctatcgattcgcgcaacttccgcaacccgcgccttgcctggcgttgcgttgccgcgtccggcccgctgtcgaatctggcgatggctgttctgtggggcgtggttttggtgctgactccgtatgtcggcggggcgtatcagatgccgttggctcaaatggcaaactacggtattctgatcaatgcgattctgttcgcgctcaacatcatccccatcctgccttgggacggcggcattttcatcgacaccttcctgtcggcgaaatattcgcaagcgttccgcaaaatcgaaccttatgggacgtggattatcctactgctgatgctgaccggggttttgggtgcgtttattgcaccgattgtgcggctggtgattgcgtttgtgcagatgttcgtctga

SEQ ID NO: 70849 - DNA, 312 bp, Neisseria meningitidis; identical to SEQ ID NO: 38726

SEQ ID NO: 70850 - DNA, 279 bp, Neisseria meningitidis
ttggggcgaaaacagccgaaaacctgtgtttgggtttcggctgtcgggagggaaaggaattttgcaaaggtctcaagctatgccggctgctgccgcccacttcatctgcgccaaatcctgccgcccaccgccgaagccctcatgcgttcgcggtacagcgcgtatgtgctgcaccttatcgactatagtggattaacaaaaaccagtacagcgttgcctcgccttgccgtactatctgtactgtctgcggcttcgtcgccttgtcctgatttttgttaa

SEQ ID NO: 70851 - DNA, 996 bp, Neisseria meningitidis; identical to SEQ ID NO: 42282

SEQ ID NO: 70852 - DNA, 492 bp, Neisseria meningitidis
atgaaataccgtcgttgttaccgcaatggtggcacttacttttttacggttgtaaccgataaacggcagaagattttgaccgatgatgcggtgcgtttggctttacggcaggcggtaatggcggtgcgcgaacggtatccgtttgaaattttggcatgggtgttgatgcccgatcatctgcataccatatggcggctgccggacaatgattctgcttattcggaacgctggcggcaaatcaagcggcacagccaatatttaatcggcggcaatctcaggctttggcaaaaacgcttttgggaatatactatccgcgatgaggccgattttgcctggcattttgattatctgcatttcaatccggtcaaacatggctatgtaggacaaatttccgattgggggttttctacgtttcaccgttatgtcaaacagggtatttatccgcataattggggtggcggcaatgcggacttttctattggatacgattga

SEQ ID NO: 70853 - DNA, 345 bp, Neisseria meningitidis; identical to SEQ ID NO: 39608

SEQ ID NO: 70854 - DNA, 237 bp, Neisseria meningitidis; identical to SEQ ID NO: 37424

SEQ ID NO: 70855 - DNA, 231 bp, Neisseria meningitidis
  misc_feature 216, 217, 218, 219, 220: 'n' is a, c, g or t
atgggcttgcaaaaggcttgtttgaccgtgttgtgcctgattgttttttgtttcgggatattttatacatttgaccgggtaaatcagggggaaaggaatgcggtttccctgctgaaggacaaactcttcaatgaagagggggaaccggtcaatctgattttctgctataccatattgcagatgaaggtggcggaaaggattatggcgcagcatccnnnnncacacacttaa

SEQ ID NO: 70856 - DNA, 480 bp, Neisseria meningitidis; identical to SEQ ID NO: 55752

SEQ ID NO: 70857 - DNA, 630 bp, Neisseria meningitidis; identical to SEQ ID NO: 54908

SEQ ID NO: 70858 - DNA, 672 bp, Neisseria meningitidis; identical to SEQ ID NO: 47737

SEQ ID NO: 70859 - DNA, 1395 bp, Neisseria meningitidis
  misc_feature 1372, 1373, 1374, 1375, 1376: 'n' is a, c, g or t
atgaaacacatccacattatcggtatcggcggcacgtttatgggtgggattgccgccattgccaaagaagcagggtttgaagtcagcggttgcgatgcgaagatgtatccgccgatgagcacccagctcgaagccttgggcataggcgtacacgaaggcttcgacgcggcgcagttggaggaatttaaagccgacgtttacgtcatcggcaatgtcgccaagcgcgggatggatgtggttgaggcgattttgaaccgcgggctgccttatatttccggtccgcaatggctggctgaaaacgtgctgcaccatcattgggtactcggtgtggcggggacgcacggcaaaacgaccaccgcgtccatgctcgcatgggtcttggaatatgccggactcgcaccgggcttccttatcggcggcgtaccggaaaacttcagcgtttccgcccgcctgccgcaaacgccgcgccaagacccgaacagccaatcgccgtttttcgtcattgaagccgacgaatacgacaccgcgtttttcgacaaacgctccaaattcgtgcattaccgtccgcgtaccgccgtgttgaacaatctggaattcgaccacgccgacatcttcgccgatttgggcgcgatacagacccagttccaccacctcgtgcgtaccgtgccgtctgaaggcctcatcgtctgcaacggacggcagcaaagcctgcaagacactttggacaaaggctgctggacgccggtggaaaaattcggcacggaacacggctggcaggccggcgaagccaatgccgatggctcgttcgacgtgttgcttgacggcaaaaaagccggacacgtcgcttggagtttgatgggcggacacaaccgcatgaacgcgctcgccgtcatcgccgccgcgcgtcatgccggagtcgacattcagacggcctgcgaagccttgagcacgtttaaaaacgtcaaacgccgcatggaaatcaaaggcacggtaaacggcatcactgtttacgacgacttcgcccaccatccgaccgccatcgaaaccaccatagaaggtctgcgtcagcgcgtcggaaacgcccgcatcctcgccgtcctcgaaccgcgttccaacacgatgaagctgggcacgatgaagtccgccctgcctgtaagcctcaaagaagccaaccaagtgttctgctacgccggcggcgtggactgggacgtcgccgaagccctcgcgcctttgggcggcaggctgaacgtcggcaaagactttgatgccttcgttgccgaaattgtgaaaaacgcccgaaccggcgaccatattttggtgatgagcaatggcggtttcggcggaatacacaccaaactgctggacgctttgnnnnncacacacttaattaattaa

SEQ ID NO: 70860 - DNA, 573 bp, Neisseria meningitidis
atgacttatgaaactcaagcttctgttcgtgaagcacaaggcactggtgcgagccgccgcctgcgtcgcgaaggccaaatccccggcattctgtacggtgaaggtcaagagcctgttgcaatcgctgtggatcacaaaaccgtattctacgcattggaaaaagaatctttccatactgcgttgattaagttgtctctgaacggtgaaaccaaagacgttatcgtccgcgatttccaaatgcacccgttccgccgcgaagttcaacacatcgacttccaagctgtgaaagccgatcaacttgtacgcatccgtgttcccctgcacatcgttaacgctgaaaattcccaagcggtcaaactgcaaggcggccgtgtatctctgttgaacacgacggttgaagtgcttgcattgcctgccaatatccctgctttcttggatttggattgtgccgaagtggttgccggcgacattctgcacttgtcagacatcaaactgcctgaaggtgtagaaagcgtttccctgaaacgtaacgaaaatctggctgttgccactgttaccggtaaaaaacgctaa

SEQ ID NO: 70861 - DNA, 1140 bp, Neisseria meningitidis
atgaaaaaaacactgatggcggcggcaatcctgagcctcgccttgactgcgtgcggcggcggaagcgataccgccgcccaagccccctccgccaagcccgaagccgaacaatcgggcaaactcaatatctacaactggtcggattatgtcgatcccgaaaccgtcgccgcctttgaaaaagaaaccggcatcaagacgcgttccgattattacgacagcaacgaaacactggaggcaaaagtcctgaccggcaaatccggctatgacctgactgcgccgtccatcgccaacgtcggccggcaaatcaaagcgggcgcgtatcagaaaatcgacaaggcgcaaatcccccattacggcaacatcgataaagatttgctgaaaatgatggaagccgtcgatccgggcaacgaatacgccgtcccctatttctggggcatcaacaccttggcaatcaacacgcggcaggtgcaaaaggcattgggtacggacaagctgcccgaaaacgaatgggatttggtgttcaaacccgaatacaccgccaaactcaaatcctgcggcatcagctatttcgacagtgcaatcgaacagattcctttggcgttgcactatttgggcaaagaccccaacagtgagaatcccgaagacatcaaagccgccgtcgatatgatgaaagccgtccggggcgacgtgaaacgcttcagttcttccggctatatcgatgatatggcggcgggcaacctgtgtgccgccatcggttacggcggcgatttgaacattgccaaaacccgtgccgaagaagccgcaaacggcgtggaaatcaaagtattgactccgaaaaccggcgtgggcgtgtgggtggattcctttatgattccgcgcgacgcgcaaaacgtcgccaacgcccaccgctatatcgactacacgctccggcccgaggtggcggcgaaaaacggcagcttcgttacctacgcgcccgccagccgtcccgcgcgcgagctgatggatgaaaaatacacctccgacgcatcgattttcccgaacaaagaactgatggaaaaaagtttcatcgtatcgcccaaatccgcagaatccgtcaaactgggcgtgaagctgtggcaagggctcaaagcgggcaaataa

SEQ ID NO: 70862 - DNA, 660 bp, Neisseria meningitidis; identical to SEQ ID NO: 44247

SEQ ID NO: 70863 - DNA, 330 bp, Neisseria meningitidis; identical to SEQ ID NO: 39814

SEQ ID NO: 70864 - DNA, 396 bp, Neisseria meningitidis; identical to SEQ ID NO: 54962

SEQ ID NO: 70865 - DNA, 1977 bp, Neisseria meningitidis
atgcaccccatcgaaacccccgacaagaccttccacgacggcgacggcgtgtccgaattgggcaccatcctgcccgcgtggtggctcaaccaagtgcaatccgagctgctggccgtgctgactgcggccggtatccagccggataagtcgcagcctaatcaattactggcagcactaaataggctggctgtagttaccaccggcgaccaaaccatcaccggccaaaaaacctttactgcccaaacccaattccaaagcggcatccatttatccgccaaccagacgaactggaacggcggccacaaagcctacatcggcgcggatgccgacaacgcccacatcgtcttcggcgacgacaccctccgcctgcacagcgcaaacaaccgcatttcctacaacaaccacgacatcttccacaaagccaacaaaccgcgttttgccgaagacatcgaaggcaaaccgaacacactgtccggatacggcatcggcaatttcaaagtcgaaacattccggggcgatttgaacaccctcaaaacagacggcatctattccctgccgacggcggtcggcagctccaacctgcccgttgaaaacaccgcctgccatatccaagtcatcgccggcacgaaacacggctggtgcaggcagttgggttatcccgcctacacgtccgacgtgtacgaacgccaccaaacgagcagcgcaaacgacaactggtccgcatggaaaaaactcaattcggacggcatccccgtcggcgcgatcgtatcctttcccaaagccgtacaaaaccccgcaggctatctcaaagccaacggcacgacctttgcgcaaaacaccttccccgacctctaccgcgccttgggcaacagcaaccgcctgcccgatttaagccgtaccgacatcggcatcaccgcgtggtttccgtccgaccaaatcccgaccggctggctggcgtttgacgacatccgcacgcgcgtaaccgaaaccgcttaccccgagctgtaccgtctgctgaccggaaaatacggcagcatccaaaacgtcccgcaggcggaagaccgctttatccgcaacgcgggcaacggcttagcagtcggaacgaagcaggaagacgaaatcaaacggcacgtccacaaagtattttcacactggacaaaccacacagacgcagccgccgtcggttacgaagaccacaacgaaaggcagagaagcgcgctcgtatcgacttggacggacggcgatttaaacgacaacggctttttaaccccgcgcctggacagcaaaatggcgacaggcggcgcagaaaaccgccccaaagccctggttttaaaactgtgcatcaaagccgccgacaccttgggcgaagccgtgttttggataaagtcccacggcgaaaccatcaacgccggcgcgctggacgcgggcacgctggcgcaaaacctgcaagacaaagccgaccgcgcccacacccacaccgccgcccaaatccaagggctggacgaaaaaatcagcaccgccgttgccgcgcaattcacacgccaaaccatcggcggcgtggatattgtcagattccccgacggcacaatgatacagaccggcagttacaggtttacaagaagcggcggccccatcgaaaacgaagtcgtcttccccgtcgcctttgccgacggcaacgtcaaatgcttcgtatccgaacgccattcgggacgcgtcaccggcgatcgaaggcaacacaactggctgtttatccgcgcaaaaaaccacgccgccgccattattaccaactggtacgaaggcagttgcgactggatggccatcggcaaagccgcctcgggaaacgccgccagctccccgataggccccgaaatacctgaaaccaacgaagaaccgcaaagagagagtggaagaacatcaaccggaccccgaaaccgccgccgccaccgagacggcctgctcgaggcactgcaagactag

SEQ ID NO: 70866 - DNA, 303 bp, Neisseria meningitidis; identical to SEQ ID NO: 37201

SEQ ID NO: 70867 - DNA, 270 bp, Neisseria meningitidis
atgccgtctgaaacctttccgtttcagacggcatggttttacagcaatctaaacagggcggaccggagtcaaaaacacaccttcgccattcctgcacaagcacttcccctatacgctcccaaccccaagccgccgcattccagacggcattacccttccgacagccgaacaaaaccccgaatccgtctgcacggttcggggcatatctccaatacgggcatcgtgttccggaaaaccgtcaaatccgcatcggcatcacaatatatttga

SEQ ID NO: 70868 - DNA, 1098 bp, Neisseria meningitidis; identical to SEQ ID NO: 36189

SEQ ID NO: 70869 - DNA, 219 bp, Neisseria meningitidis; identical to SEQ ID NO: 36470

SEQ ID NO: 70870 - DNA, 1392 bp, Neisseria meningitidis; identical to SEQ ID NO: 38462

SEQ ID NO: 70871 - DNA, 855 bp, Neisseria meningitidis
atgttttaccaaatccttgccctgattatctggagcagctcgtttattgccgccaaatatgtctatggcggcatcgatcccgcattgatggtcggcgtgcgcctgctgattgctgcgctgcctgcactgcccgcctgccgccgtcatgtcggcaagattccgcgtgaggaatggaagccgttgctgattgtgtcgttcgtcaactatgtgctgaccctgctgcttcagtttgtcgggttgaaatacacttccgccgccagcgcatcggtcattgtcggactcgagccgctgctgatggtgtttgtcggacactttttcttcaacgacaaagcgcgtgcctaccactggatatgcggcgcggcggcatttgccggtgtcgcgctgctgatggcgggcggtgcggaagagggcggcgaagtcggctggttcggctgcctgctggtgttgttggcgggcgcgggcttttgtgccgctatgcgtccgacgcaaaggctgattgcacgcatcggcgcaccggcattcacatctgtttccattgccgccgcatcgttgatgtgcctgccgttttcgcttgctttggcgcaaagttataccgtggactggagcgtcgggatggtattgtcgctgctgtatttgggtttggggtgcggctggtacgcctattggctgtggaacaaggggatgagccgtgttcctgccaatgtttcgggactgttgatttcgctcgaacccgtcgtcggcgtgctgctggcggttttgattttgggcgaacacctgtcgcccgtgtccgccttgggcgtgtttgtcgtcatcgccgccaccttggttgccggccggctgtcgcatcaaaaataa

SEQ ID NO: 70872 - DNA, 612 bp, Neisseria meningitidis; identical to SEQ ID NO: 39736

SEQ ID NO: 70873 - DNA, 1311 bp, Neisseria meningitidis
atggacacttcaaaacaaacactgttggacgggatttttaagctgaaggcaaacggtacgacggtgcgtaccgagttgatggcgggtttgacaacttttttgacgatgtgctacatcgttatcgtcaaccctctgattttgggcgagaccggcatggatatgggggcggtattcgtcgctacctgtatcgcgtctgccatcggctgttttgttatgggttttgtcggcaactatccgattgcactcgcaccggggatggggctgaatgcctatttcacctttgccgtcgttaagggtatgggcgtgccttggcaggttgcgttgggtgcggtgttcatctccggtctgattttcatcctgttcagcttttttaaagtcagggaaatgctggtcaacgcactgcctatgggtttgaaaatgtcgattgctgccggtatcggtttgtttttggcactgatttccctgaaaggcgcaggcattatcgttgccaatccggcaaccttggtcggtttgggcgatattcatcagccgtccgcgttgttggcactgttcggttttgctatggtggtcgtattgggacatttccgcgttcaaggcgcaatcatcatcaccatcttgaccattaccgtcattgccagcctgatgggtttgaatgaatttcacggcatcatcggcgaagtaccgagcattgcgccgacttttatgcagatggattttgaaggcctgtttaccgtcagcatggtcagtgtgattttcgtcttcttcttggtcgatctatttgacagtaccggaacgctggtcggcatatcccaccgtgccgggctgctggtggacggtaagctgccccgcctgaaacgcgcactgcttgcagactctaccgccattgtggcaggtgcggctttgggtacttcttccaccacgccttatgtggaaagcgcggcgggcgtatcggcaggcggacggaccggcctgacggcggttaccgtcggcgtattgatgctcgcctgcctgatgttttcacctttggcgaaaagtgttccggcatttgccaccgcgcccgccctgctttatgtcggcacgcagatgctccgcagtgcgagggatattgattgggacgatatgacggaagccgcacccgcattcctgaccattgtcttcatgccgtttacctattcgattgcagacggcatcgccttcggcttcatcagctatgccgtggttaaacttttatgccgccgcaccaaagacgttccgcctatggtatggattgttgccgtattgtgggcactgaaattctggtatttgggctga

SEQ ID NO: 70874 - DNA, 3210 bp, Neisseria meningitidis
atgttttatctgtatcaatccaaccgtcttgaaacgctggcggcactgtttgcccgcattcaaaaagtcaaaccgctgaaatcggttttacagcccgaacagattattgtgcagagtcaggggatgcgccgctacctcaatacctgcctcgcccgcgatttgggcgtggcggcgaatttgtcgttcagcctgcccgccggtctgacgtggaagctgatgaaaaaactgattcccggtattccggaactcagcccgtttgcgcctgaagtgatgcgctggcggctgttggatttgttccgcagcgaggcatttcggaatacggcagaatttgaagatgtgaggaatgtgctgcaagactatctaggcagcggcgaatcggcagattatcagcttgcgggacagcttgcggacatattcgaccaataccttgtctatcgtccgcagtggatagacgcgtggcagcagggcaggatactcagtttgggcgacgatgaaatctggcagtccaaactgtggcgttatcttgatgacggcaggcagagcgcgccgcaccgtgttgcgttgtgggaaaagctgttggaatctttgagcagtgataagctgcccgagcgttatttcgtgttcggcatttccacgatggcgccgatgtatttgcagcttttgcacaagctgtccgaacattgcgatgtgttcgtgtttgcactcaatccgagtgggatgtattggggcaacgtcatcgaagcggcgcaaatcctcaaaggcggcggcgatcccgatttaactcaggcagggcatccgctgctcgcctcattgggcaagcaggggcgcgactttttcgactttttgaacgaaatggaaatagaaggagaaacgccggtatttgaagaaggcgggcgcgatacgcttttgcacgccctgcaaaccgatattcaaaacctgaaaatgccgtctgaaaatgtgggaagcgtcggtacggatgacggttcgatacgtatcgtctccgcgcacagccctttgcgcgaattgcagatactcaaagacaagctgttgaaaattctgcatgaacatcccgattggcagccgcatgatatcgccgtattaaccccgaacatcgaatcctatacgccttttatcgaagccgtgttcggacaggcgcagcccggtgcgcaggcattgccgtattccgtttcagacgtgaaaatcagccgccgacaaccgtttttttatacattggaatgcctgtccgacttgttggaaagccgatttgaagtcgataaagtgcttgtgcttttagaaaccgcacccgtgttgcgccgtttcggactgactgaggacgatttgccgcttttgcacgacatggttgccgatttgaacgtccgctggggtttggacggagaaatgcgcggcggcacggatcagctgtttacctggaagcaggcggtagaacgcatgatattgggctggatgctgcccgaaggcggcaatccgatgtggcaggatgtcagcgcgtggtatgccgacgtgaaccaaaccgccctgttcggacgttttgccgccctcctcgaaaccctgtcggatattgtacggatatggcagcaacctgcgacggtcggcgaatgggtggcgcgttgccgggatttgcttgaaacattgttccaaaccgaagccgatgaccaaaaggcagtccaaaacctcgaaaacgaatgggtcaaatggcaggcggaaaccgaattggcgcaattttccggacagttgccgccgcacaccgtcatccgccacatccgccgctttctcgacagcgaaagcgaggcaggctttttacgcggcggcatcaccttttgcagtatggtgccgatgcggagcctgccctttaaagtcatctgtctgttgggtttgaacgacggagattttccccgcaataccaaagccgccgtattcgacctgattgccaaacatcccgccaaaggcgaccgcgcccgccgcgatgacgaccgctacctgttcctcgaagccctcatcagcgcgcgtgaaatcctctacctgtcctacatcgggcgcgacatccgcaaagacgaagagcttgccccgtcttccctgttgggcgaactcatcgataccgttgccgctatggcgggcatcggtagtcgccaacttgcacaaaactggatagaacagcatccgctgcaagccttttcacgccgatatttccaagaaggcggacgttcagacggcatattcggcacgcgtaccgactacgccaccgcgctcggacaaacgcccgaaccgccgcaaccctttttcgaccaacccgtagaaaacgccgaacctgttgccgaaatcggacaggacgaatttatccgtttctggcgcaaccccgtcaaagtatggcttcagcagcagcttgcgtggagcgaaccccatatcggcgaagcctgggagcctgccgaacccttcgagccgcaacacgccgatcaaatcgccgaaatctatattgaggcgcgccgcgaaggacaagatttttcccaaaccgccgcccgcatcagggcggaaagcctgctgccgtcgggagagttgggcagactttggcagcaggacttccaaaccgctgccaaacaaatcgacacggcggttttaaacagtcccaaacttcctccgctgccctacgccataccgtcggacgggcaaatcctgaaaggcagcttgggcaatctgtaccgctgcggacaagtgttttacgcctacggcaaacccaacgcgccgcaacgtatcgcttttttgttggaacacctgatattttgcgccgttatgccgtctgaagccgaaatgcggcaaacctttatcgtccaatccggagaaaccgaaatattggcggaaatcgcgcaagacagggcattgcagctattgtcggaatggatggcgtttttcaatatcgggcaaaaccgcccgctgccgttttttgccaaaacctcgcttgccgccgccgaagcgtttgcccaaaaacaagattgggaagccgccctgaaaaaagcccaaaccgcctaccacggcaacaaagtcagcaaagggcagaaagactataccgaagtcgccctcgtgttcggcaacgcaagccaaaacccgctcgaacagcccctgtttgaaaacctcgtccgtctgcttgccgacacgtttgccgcagcggaaaaaaaggaagaggccggagcagcctga

SEQ ID NO: 70875 - DNA, 318 bp, Neisseria meningitidis; identical to SEQ ID NO: 54948

SEQ ID NO: 70876 - DNA, 279 bp, Neisseria meningitidis; identical to SEQ ID NO: 56003

SEQ ID NO: 70877 - DNA, 462 bp, Neisseria meningitidis
atgtctgatttaccctctatctcccgattccttgccgacgaagccgccacactcgatttgggcgcggcgtggtcttcccgtttaaacgcaccgctggtcatttatctcgaaggggatttgggtgcgggcaaaaccacgctgacacgcggcatcctgcgcggattgggtcatcagggcgcagtcaaaagcccgacctacgccatcgtcgaatcttatccgctggaacgcttcaccttgcaccatttcgacctctaccgcttctcgttccccgaagaatgggaagatgccggattggacgaactgtttgccgcaaacagcgtctgcctgatcgaatggccgcaacagggcggggaatttacgccgcctgccgacatcaccgcaacattgacacacgacggcgacggcagaaaatgcctgctgaccgcccataccgaacgaggacgcgaaagcctgccgctatga

SEQ ID NO: 70878 - DNA, 633 bp, Neisseria meningitidis; identical to SEQ ID NO: 54940

SEQ ID NO: 70879 - DNA, 216 bp, Neisseria meningitidis; identical to SEQ ID NO: 42474

SEQ ID NO: 70880 - DNA, 852 bp, Neisseria meningitidis; identical to SEQ ID NO: 55209

SEQ ID NO: 70881 - DNA, 549 bp, Neisseria meningitidis
  misc_feature 530, 531, 532, 533, 534: 'n' is a, c, g or t
atgagcaccttctttcagcaaaccgcacaagccatgattgccaaacacatcgaccgtttcccactattgaagttggatcaagtgattgattggcagccgatcgaacagtacctgaaccgtcaaaaaacccgttaccttagagaccaccgcggccgtcccgcctatcccctgttgtccatgttcaaagccgtcctgctcggacaatggcacagcctctccgatcccgaactcgaacacagcctcatcacccgcatcgatttcaacctgttttgccgttttgacgaactgagcatccccgattacagcaccttatgccgctaccgcaactggctggcgcaagacgacaccctgtccgaattgctcaaactgattaaccgacaactgaccgaaaaaggcctaaaagtagagaaagcatccgccgccgtcattgacgccaccattattcagaccgctggcagcaaacagcgccaggccatagaagttgacgaagaaggacaaatcagcggccaaaccacaccgagtaaagacannnnncacacacttaattaa

SEQ ID NO: 70882 - DNA, 366 bp, Neisseria meningitidis; identical to SEQ ID NO: 44550

SEQ ID NO: 70883 - DNA, 837 bp, Neisseria meningitidis
atgttagcgctcaaaacgcccggcgtactgcccggcttcaaactcagccttggtctgaccgtattgtgcctgtcgctgcttgtggtcttgccgtttgcgatgatggcggcgaaggcggcggaaatcggctggagcggattttggaacacgattaccgagccgaacgtgttggcggcggtgtggctaagtttgcggatgtcgttttatgcgatgctgaccaatgtcgtgttcggcacgctggtggcgtgggtattggtgcgctatgaatttccgggcaagggtctggcgaacgcgctggttgatttgccgtttgcgctgccgacggcggttacgggtatcgcgttggcaaccctgtatgcgcccaacggttggataggccgttttttcgagcctttgggcatcaaaatcgcgtttacgcccgtcggcatttggattgcgctggtcgtcgtcagcctgccctttatcgtccgcgccgtgcagccggtgttggaggaattatcgggcgaatatgaggaagcggcggcgactttgggcgcaaaccgctttacgacgttccgccgcgtgctgctgccggaaatcacgccggcactcttgaccggcgcgggaatgatgttcgcgcgggcaacgggggaatacggctcggtgatttttatcgcgggcaatattccgatggtttctgaaatcctgccgctgattattacgggcaagctggaacaattcgacgtacagggcgcgtcggcggtggcgttgtttatgctgctggtttcgtttgtgattctgtttgcgctgaacgtgatgcagtgggcgttgggcaggcgttcgggcgcgaagggttga

SEQ ID NO: 70884 - DNA, 621 bp, Neisseria meningitidis; identical to SEQ ID NO: 48243

SEQ ID NO: 70885 - DNA, 504 bp, Neisseria meningitidis; identical to SEQ ID NO: 61647

SEQ ID NO: 70886 - DNA, 198 bp, Neisseria meningitidis; identical to SEQ ID NO: 46017

SEQ ID NO: 70887 - DNA, 1155 bp, Neisseria meningitidis
atggatacgcacgcggacgaaacaaaacttcaaaacacgcaagccaaacgcaaacgccgcctgacggcattgacgctgctgttcgcgcttgccgccgcagccgccgggtcggcgttttttttatggtggcagcacgaagaggaaacggaagacgcttatgttgccggacgcgtggttcaggttacgccgcaaaagggcggtacggtgcggaaggttttgcacgacgatacggatgccgtgaaaaaaggcgacgtgctggcggtattggacgacgataatgatgtgctggcttacgagcgggcaaaaaacgagctgattcaggcggtgcggcaaaaccgccggcaaaatgccgccacttcgcaggcgggggcgcaggttgccttgcgccgggcggatttggcgcgcgcgcaggatgatttgcgccgccggtctgctttggcggaatcgggcgcggtgtccgccgaagagctggcacatgcccgtgcggcagtgtctcaggctcaggcggcagttaaggcggctttggcggaagaatcttcggcgcgtgcggctttgggcggtcaggtttctttgcgcgaacagccggcggttcagacggcaatcggcaggttgaaagatgcgtggttgaaccttcagcggacgcaaatccgcgcgccggcggacggtcaggtggcgaagcgttcggtgcaggtcgggcagcaggtggcggcaggcgcgccgctgatggcggtggtgccgctgtcggatgtgtgggtggatgctaattttaaagagacgcagttgcggcatatgaaaatcggacagcctgccgagctggtgtccgatttgtacggcaaacaaattgtttatcgcggcagggtggcaggtttttcggcaggtacgggcagcgcgttttcgctgattccggcgcaaaacgcaacgggcaactggattaaagtggtgcagcgcgtccccgtccgtatcgtgctgaaccgcgaagatgtggacaggcatccgttgcgtatcggtttgtcgatgacggttaaagtggatacttccgccgcaggcgcgcctgtttcaaaaacgccgggtgcggcattgccggaaatggaaagtaccgactggtcggaagtcgatcggacggtcgatgaaatcctcgggcaatccgcgccctga

SEQ ID NO: 70888 - DNA, 963 bp, Neisseria meningitidis; identical to SEQ ID NO: 69545

SEQ ID NO: 70889 - DNA, 198 bp, Neisseria meningitidis; identical to SEQ ID NO: 55598

SEQ ID NO: 70890 - DNA, 822 bp, Neisseria meningitidis
atgtctttgcaaaacattatcgaaaccgcctttgaaaaccgcgcggacattaccccgaccaccgttactcccgaagtcaaagaagccgtgttggaaaccatccgccaactcgattcaggcaaactgcgcgttgccgaacgcttgggcgtgggtgagtggaaagtcaacgaatgggcgaaaaaagccgtgttgctgtccttccgcatccaagacaacgaagtcctcaacgacggcgtgaacaaatacttcgacaaagtgccgaccaagtttgccgactggtctgaagacgagttcaaaaacgcaggcttccgcgccgttccgggtgcggttgcccgacgcggcagctttgtggcgaaaaatgtcgtgctgatgccgtcttacgtcaacatcggcgcatacgtcgacgaaggcgcgatggttgatacttgggcgaccgtcggctcttgcgcgcaaatcggtaaaaacgtgcacttgagtggcggcgtcggtatcggcggcgtactcgaacccctgcaagccagcccgaccatcattgaagacaactgcttcatcggtgcgcgttctgaaatcgttgagggcgtgattgtcgaagaaggcagcgtgatttcgatgggcgtgttcatcggtcaatccaccaaaatcttcgaccgcaccacaggcgaaatctaccaaggccgcgtaccggcaggttcggttgttgtgtccggcagtatgccttccaaagacggcagccacagcctttactgcgccgtcatcgtcaaacgtgtggacgcgcaaacccgtgcgaaaaccagcgtgaacgaattgttgcgcggcatctga

SEQ ID NO: 70891 - DNA, 195 bp, Neisseria meningitidis
ttggaatctcatgatttggcagaaggatatacttatttcttcaatgaaaatacggatgattgctatgttttgaaagaggattttattaataatgagcgatatgaaaaaacagaattatatccccaaaaagataaggtaattctatttccaaagtttggcgaatatgatttggtgttaaatccggacattatttaa

SEQ ID NO: 70892 - DNA, 1521 bp, Neisseria meningitidis; identical to SEQ ID NO: 68688

SEQ ID NO: 70893 - DNA, 1101 bp, Neisseria meningitidis
atggaaacacagctttacatcggcatcatgtcgggaaccagcatggacggggcggatgccgtactgatacggatggacggcggcaaatggctgggcgcggaagggcacgcctttaccccctatcccgacaggctgcgccgccaattgctggatttgcaggacacaggcgcagacgaactgcaccgcagcaggattttgtcgcaagaactcagccgcctgtacgcgcaaaccgccgccgaactgctgtgcagtcaaaacctcgcaccgtccgacattaccgccctcggctgccacgggcaaaccgtccgacacgcgccggaacacggttacagcatacagcttgccgatttgccgctgctggcggaacggacgcggatttttaccgtcggcgacttccgcagccgcgaccttgctgccggcggacaaggcgcgccactcgtccccgcctttcacgaagccctgttccgcgacaacagggaaacacgcgcggtactgaacatcggcgggattgccaacatcagcgtactcccccccgacgcacccgccttcggcttcgacacagggccgggcaatatgctgatggacgcgtggacgcaggcacactggcagttgccttacgacaaaaacggtgaaaaagcggcacaaggcaacatattgccgcaactgctcgacaggctgctcgcccacccgtatttcgcacgaccccaccccaaaagcacggggcgcgaactgtttgccctaaattggctcgaaacctaccttgacggcggcgaaaaccgatacgacgtattacggacgctttcccgttttaccgcgcaaaccgttttcgacgccgtctcacacgcagcggcagatgcccgtcaaatgtacatttgcggcggcggcatccgcaatcctgttttaatggcggatttggcagactgtttcggcacacgcgtttccctgcacagcaccgccgacctgaacctcgatccgcaatgggtggaagccgccgcatttgcgtggttggcggcgtgttggattaatcgcattcccggtagtccgcacaaagcaaccggcgcatccaaaccgtgtattctgggcgcgggatattattattga

SEQ ID NO: 70894 - DNA, 519 bp, Neisseria meningitidis; identical to SEQ ID NO: 55905

SEQ ID NO: 70895 - DNA, 810 bp, Neisseria meningitidis
atgattcaagacacccgcccccttatccgcgtcgttgccggcatcctgctcgattcagacggcaactacctgctcagctcgcgccccgaaggcaaaccctatgccggatattgggaatttgccggcggcaaggtcgaagcgggcgaaaccgacttccaagccctgcaacgcgagtttgaagaagaactcggcatccgcatcctcgccgccacgccttggctgaccaaaatccattcctacgaacacgcccgcgtctgcctgaaattcctatgggtcaaccccggccaatggacgggcgaaccgcaatcccgcgaagggcaggaatggtcttggcagaaggcgggtgattttaccgttgcccccatgctgcccgccaacggcgcgcttttgcgttcgctgtccgttccgcgccgtttgtacggcagcctgaaaacgggtttgcacggggagaacagtatgggcgcgtaccgcgtcctgcctttgggttcggcagagggaagcggtgcgaacgttttgatggaggcggcgcaatggcaggacagacccgaacacgccgacagcgtgtggatggtggtgcagacccgcgaacaatggcggcaggcgcaggaaaagggcgcggatgcggtcgtttggcgcgtgtgcgatgatgttcaggcacaagaggcggcagaagccctgcggcagggcgtatccgtgccgctcgtacttgcagcaaacggacagacggttgcacgttatggaaaactatggctcggattgggggcgcacgtggtggtaagggatgaaacaatagggaagaatcatgaataa

SEQ ID NO: 70896 - DNA, 747 bp, Neisseria meningitidis
atgaaaagcagcacgcaggccgttttggaacacaccgccattcccaagcatatcgccgtgattatggacggcaacggccgttgggcgaaaaaacgtttcctcccgcgcataatgggacacaaacgcggtttggacgcattggaaaatatggtgaagcattgcgccaaactgggtgtgcaatatctgaccgtgtttgccttttcaaccgaaaactggcgccgccccgaagacgaagtttcgttcctgatggggctgtttttacaggctttgcaaaaacaggtacgccgtctgcacgaaaacaatatgcgcctaaaaatactgggcagccgcgaacgctttaatcggcagattctgcaaggcatcgaagaggcggaagccttgacggcaaacaataccggcctgaccctgagcattgccgccgattacggcggacgttgggatattttgcaggcggcaaacaaactgattgccgaaggcgtatccgagattacggaagacacgctggcgaaacacttgatgctgggcgatgcaccggaaccggatttgttcatccgcaccggcggcgaaacgcgcatcagcaatttcctgctctggcagatggcatatgcagaactgtatttcaccgatattttgtggcccgattttgacggcaaggctttggacgatgccgtcgcttcgttccaaaaacgcgaacggcggttcggacgcacctccgagcaactgcctatcgaacagcaaaggaactaa

SEQ ID NO: 70897 - DNA, 738 bp, Neisseria meningitidis
atgaaaaaattatctcggattgtattttcaactgtcctgttgggtttttcggccgctttgccggcgcagacctattctgtttattttaatcagaacggaaagctgacggcgacgatgtcttctgccgcttatatcaggcaatatagtgtggcggagggtattgcgcacgcgcaggatttttattatccgtcgatgaagaaatattccgaaccttatatcgttgcttcaacgcaaatcaaatcttttgtgcctaccctgcaaaacggtatgttgattttgtggcattttaatggtcagaaaaaaatggcggggggcttcagcaagggtaagccggacggggagtgggtcaactggtatccgaacggtaaaaaatctgccgttatgccttataaaaatggcttgagtgagggtacgggataccgctattaccgtaacggcggcaaggaaagcgaaatccagtttaagcaaaataaggcaaacggcgtatggaagcaatggtatgccgacggcagtatcaagacggaaatggttatggtcaacgatgagcctgccaaaattctgacttgggatgaaagcggccgattactctcggaactgtctatccgccaccatcaacgcaacggggtggttttggagtggtatgaagatggttctaaaaagagcgaagctgtttatcaggatgacaagttggtcaggaaaacccagtgggataaggatggttatttaatcgaaccctga

SEQ ID NO: 70898 - DNA, 3216 bp, Neisseria meningitidis; identical to SEQ ID NO: 55312

SEQ ID NO: 70899 - DNA, 270 bp, Neisseria meningitidis; identical to SEQ ID NO: 36672

SEQ ID NO: 70900 - DNA, 2076 bp, Neisseria meningitidis
atgctgtgcgtgttggcgggcgcggcttacggcgtattcaggacggaggcggcattgtcttcccaatggtgggcagaagccgtttcaggcgtgcctttgacggtggaagtggcggatatgccgaggtcggacgggcggcgtgtgcagtttgcggcaaaggctgtggacagcggtggtcggacgtttgatttgctgctgtcggactacaaacggcgcgaatgggcggtcgggagcagatggcggataacggcacgtgtgcaccctgtcgtcggggagttgaacctgcgcggtttgaaccgtgaggcgtgggcattatccaacgggataggcggcgcggggacggtcggtgcggacagggttttgctgcatgacggaagcggttgggggattgcggtttggcgcagccgcatcagccgtaattggcagcaggcggatgcggacggcgggctttcagacggcatcgggctgatgcgcgcgttgagcgtgggcgaacagtcggcattgcgccccgaattgtggcaggcgttccgaccgttggggctgacgcatttggtcagtatttcgggtttgcacgttacgatggtggcggtgatgtttgcgtggctggcgaagcggctgcttgcctgttccccgcgccttcctgcccggccgcgcgtgtgggttttggcggcggggtgtgcaggcgcgctgttttacgcgctgcttgccggtttttccgtgccgacgcagcgcagcgttttgatgttggcggcgtttgcgtgggcttggcgcaggggaagattgtcggcgtgggcgacgtggtggcaggcgttggcggcggtgctgctgttcgacccgtcggcggtcttgggtgtggggacttggctgtctttcggtttggtggcggccctgatatgggcgtgctcggggcgtttgcacgagggaaaacggcaaactgctttgcgcgggcagtgggcggcttcggtgttgtcgctggttttgctcggttatctgtttgcttcgctgcctttaatcagccctttggtcaatgcggtggcaattccgtggttttcttgggtattgacgccgctggcgttgctgggttcggtcgtgccgtttgcgcctttgcaacagttgggggcatttttggcggaatatactttgcggtttttggtgtggcttgccgatgtgtcgcccgagtttgccgttgcctccgcacctttgccgctgttggtgttggcggtgtgtgccgctttgctgttgctgctgccgcgcggcttgggtttgcgtccgtgggcggtgttgctgttggcagggtttgtgttttaccgttcacccggcgtgccggaaaatgaggttgcggttacggtttgggatgcggggcagggtttgtcggtgtcggttcagacggcaaatcatcatcttttgtttgacaccggaacggcagcggcggcgcagatggggattgtgccgagtttgaatgcggcgggtgtccgccgtttggacaagctggttttgtcgcatcacgacagcgaccacgacggcggttttcaggcagtcggcaagataccgaacggcgggatttatgccggacagccggaattttatgagggggcgcggcattgtgcggaacagcgttggcaatgggacggcgtggattttgagtttttgatgccgtctgaacgcaaaaacatcgatgataatgggaaaagttgtgttttgcgtgttgtggcgggcggtgcggcactgctggtaacgggcgatttggatacgaagggcgaggaaagcctggtcggcaagtatggaggcaacctgtacagccaggttttggtgttgggacatcacggcagcaatacgtcctcgtcgggcgtgttcctcaatgccgtctcgcccgaatatgccgttgcttcaagcggttatgccaacgcctacaaacatccgaccgaagcggtgcagaaccgtgtccgcgcacacggcatcaaactgctgcgtaccgatttgtcgggcgcactgcaattcggcttgggacgcggcggcgtgaaggctcaacgtttgagagggtataaattctattggcagaaaaaaccgtttgaatga

SEQ ID NO: 70901 - DNA, 1356 bp, Neisseria meningitidis
atgtcggaatatacgcctcaaacagcaaaacaaggtttgcccgcgctggcaaaaagcacgatttggatgctcagtttcggctttctcggcgttcagacggcctttaccctgcaaagctcgcaaatgagccgcatttttcaaacgctaggcgcagacccgcacaatttgggctggtttttcatcctgccgccgctggcggggatgctggtgcagccgattgtcggccattactccgaccgcacttggaagccgcgtttgggcggccgccgtctgccgtatctgctttatggcacgctgattgcggttattgtgatgattttgatgccgaactcgggcagcttcggtttcggctatgcgtcgctggcggctttgtcgttcggcgcgctgatgattgcgctgttggacgtgtcgtcaaatatggcgatgcagccgtttaagatgatggtcggcgacatggtcaacgaggagcagaaaggctacgcctacgggattcaaagtttcttagcaaatacgggcgcggtcgtggcggcgattctgccgtttgtgtttgcgtatatcggtttggcgaacaccgccgagaaaggcgttgtgccgcagaccgtggtcgtggcgttttatgtgggtgcggcgttgctggtgattaccagcgcgttcacgattttcaaagtgaaggaatacgatccggaaacctacgcccgttaccacggcatcgatgtcgccgcgaatcaggaaaaagccaactggatcgaactcttgaaaaccgcgcctaaggcgttttggacggttactttggtgcaattcttctgctggttcgccttccaatatatgtggacttactcggcaggcgcgattgcggaaaacgtctggcacaccaccgatgcgtcttccgtaggttaccaagaagcgggcaactggtacggcgttttggcggcggtgcagtcggttgcggcggtgatttgttcgtttgtattggcgaaagtgccgaataaataccataaggcgggttatttcggctgtttggctttgggcgcgctcggctttttctccgttttcttcatcggcaaccaatacgcgctggtgttgtcttataccttaatcggcatcgcttgggcgggcattatcacttatccgctgacgattgtgaccaacgccttgtcgggcaagcatatgggcacttacttgggcctgtttaacggctctatctgtatgcctcaaatcgtcgcttcgctgttgagtttcgtgcttttccctatgctgggcggcttgcaggccactatgttcttggtagggggcgtcgtcctgctgctgggcgcgttttccgtgttcctgattaaagaaacacacggcggggtttga

SEQ ID NO: 70902 - DNA, 1398 bp, Neisseria meningitidis
atgactgtccgtatcgaacacgatttattgggcgaccgcgagattcccgccgaagtgtattggggcatccacaccctgcgcgccattgaaaactttaaaatctccacacaaaaaatttctgacgtgccgcagtttgtccgcagtatggtgatggtgaaaaaggcgacggcacaggcaaacggtgagttgggcgcggtcaagcccgaaatcgccgccgccattgaaaaggcttgcgacgaagttctgctgaacaaccgctgcctcgaccaattcccctccgacgtgtatcagggcggtgcgggaacttcggttaatatgaacaccaacgaagtcatcgccaacctcgcattggaagccttgggatacgaaaaaggccgctacgacatcgtcaatccgatggatcacgtcaacgccagccaatccaccaacgatgcctaccctaccggcttccgccttgccgtgtattacagtatcggcgaattgctcgacaaactggtcgttctgaaaaacgcctttgccgccaaagccgaagaatttaaagacgttttgaaaatgggccgcacccagcttcaagatgccgtgccaatgactacaggacaagaattccaatctttccaagtgttgttggaagaagaaatcctcaacctcgaccgcacgcgccaactgcttttagaagtcaatttgggcgcaacggcaatcggcacgggcgtgaacacgcccaaaggctacgccgaactggtggtcaaaaaactctccgaagtcagcggcttgccttgcaaactgaccgaaaacctgattgaggcgacctccgactgcggcgcatatgtgatggtacacggcgcattgaagcgcacggcggtcaaactctccaaaatctgcaacgacttgcgcctgctctcttccggcccgcgtgccggcttgaaagaaatcaacctgcccgaattacaggccggttcttccattatgcctgccaaagtcaatcccgtgattcccgaagtggtcaaccaagtctgcttcaaagtcatcggcaacgatacgacgattaccttcgccgccgaagccgggcaactgcaattaaacgtgatggagccggtcatcgcccaatgtatgtttgaaaccatttccctcttgggcaatgcagcaatcaacctgtccgacaaatgcgtcaaaggcattacggtcaaccgcgaaatatgcgagcgttacgttttcaactccatcgggctggttacttatctgaatccgtatatcggccaccacaacggcgatttggtcggcaaaatctgcgcccaaaccggcaaaggcgtgcgcgaggttgtcttggaacgcgggctgttgagcgaagaagaactcaaccgcatcctctctcctgaaaacctgatgaacccccatctgtaa

SEQ ID NO: 70903 - DNA, 423 bp, Neisseria meningitidis; identical to SEQ ID NO: 55662

SEQ ID NO: 70904 - DNA, 366 bp, Neisseria meningitidis; identical to SEQ ID NO: 38043

SEQ ID NO: 70905 - DNA, 951 bp, Neisseria meningitidis; identical to SEQ ID NO: 42789

SEQ ID NO: 70906 - DNA, 1083 bp, Neisseria meningitidis
atgtttttatggctcgcacatttcagcaactggttaaccggtctgaatatttttcaatacaccacattccgcgccgtcatggcggcgttgaccgccttggcgttttccctgatgttcggcccgtggacgatacgcaggctgaccgcgctcaaatgcgggcaggcagtgcgtaccgacggcccgcaaacccacctcgtcaaaaacggcacgccgacgatgggcggttcgctgattctgaccgccattaccgtgtccaccctgttgtggggcaactgggcgaacccgtatatctggattctcttgggcgtcttgcttgccaccggcgcgctcggtttttacgacgactggcgcaaagtcgtctataaagaccccaacggcgtgtccgccaaattcaaaatggtgtggcagtcgagtgttgccgttatcgccggtttggcattgttttaccttgccgccaattccgccaacaatattttgattgtcccattctttaaacaaattgtcctgccgctgggcgtggtcggctttttggtgttgtcttacctgaccatcgtcggcacatccaacgccgtcaaccttaccgacggcttggacggccttgccgccttccccgtcgtcctcgttgccgccgggctcgccattttcgcctacgtcagcggacactaccaattttcccaatacctccagcttccctatgtcgccggtgcgaacgaagtcgctatattctgcaccgccatgtgcggcgcgtgcctcggatttttgtggtttaacgcttatcccgcgcaagtctttatgggcgacgtcggcgcattggcattgggtgccgcgcttggtaccgttgccgtcatcgtccgtcaagaatttgttttagtgattatgggcggattatttgtcgtcgaagctgtatccgttatgcttcaggtcggctggtataagaaaaccaaaaaacgcatcttcctgatggcgcccatccaccaccactacgaacaaaaaggctggaaagaaacccaagtcgttgtccgtttctggattattaccatcgtcttggtgctgatcggcttgagtaccctcaaaattcgctga

SEQ ID NO: 70907 - DNA, 1065 bp, Neisseria meningitidis; identical to SEQ ID NO: 55454

SEQ ID NO: 70908 - DNA, 780 bp, Neisseria meningitidis
atgttttttgtcctttcccctgcgaagaaccttaatgaaaaagaccctgcccctgtcagcgagtttacccaacccgacctgctggcagagtccgacattctaatgcagcagttgcgcgagcttgcgccgcaacagattgccgaactgatgcacgtttccgacaaaattgccctcttaaacgcgcagcgcaatgcagaatggcacacgccgtttacgccggaaaacgccaaacaggcggtctttatgttcaacggcgatgtttacgaaggtatggatgcaaacacattggatattggacagatacgctatctgcaaaaccatgtccgcctgctgtccggtctgtacggtcttcttcgcccgttagacctgatacagccctatcgtttggaaatggggacggcatttgccaatttgcgcggcaagaatttgtatgagttttggggcgacatcattaccaaccttttaaatgacacgcttgcccaagcaggcagcaatacgcttgtcaaccttgcctcacaggaatatttcaagtccgtcaacacgaaaacacttcgggcgcggctgattaccccgatatttaaagacgaaaaaaacggtaaatataaaatcatcagtttctatgccaagcgtgcgcgcggattaatggtgcgctatgcggcagaacatcatattaccgaccctgaaatgctgaaaaattttaattacgaaggctacgcattcaatgacgcggcttccaatgaaagcgaatgggtgtttatgcgttcggaacaaataaagtaa

SEQ ID NO: 70909 - DNA, 300 bp, Neisseria meningitidis; identical to SEQ ID NO: 55276

SEQ ID NO: 70910 - DNA, 417 bp, Neisseria meningitidis; identical to SEQ ID NO: 55659

SEQ ID NO: 70911 - DNA, 564 bp, Neisseria meningitidis; identical to SEQ ID NO: 67424

SEQ ID NO: 70912 - DNA, 1380 bp, Neisseria meningitidis
atgctgctcgacctcaaccgcttttccttttccgtcttcctgaaagaagtccgcctgctgaccgctcttgccctgcccatgctgttggcgcaggtcgcgcaggtgggcatcggttttgtcgataccgtgatggcgggcggtgcgggcaaggaagacttggcggcggtggctttgggcagcagcgcgtttgccacggtttatattacctttatgggcattatggcggcgctgaacccgatgattgcccagctttacggcgcgggtaaaaccgacgaagtgggcgaaacgggacggcaggggatttggttcgggctgtttttgggcgtgttcggcatggtcttgatgtgggcggcgattacgccgttccgcaactggctgaccttgagcgattatgtggaaggcacaatggcgcagtatatgctgttcaccagcttggcgatgccggcggcaatggtacaccgcgcactgcacgcctacgcctccagcctgaaccgcccgcgcctgattatgttggtcagctttgcggcgtttgtgttgaacgtgccgctgaactatattttcgtttacggcaaattcggtatgcccgctttgggcggcgcaggctgcggactggcgacgatggcggtgttttggttcagcgcgctggcattgtggatttatatcgccaaggaaaatttcttccgcccattcggactgacggcgaaattcggcaaaccggattgggcggtgttcaaacagatttggaaaatcggcgcacccatcgggctgtcttattttttggaagccagcgcgttttcgtttatcgtgtttttgattgcgcctttcggcgaggattatgtggcggcgcagcaggtcggcatcagtttgtcggggattctctatatgattccgcaaagcgtcggctcggcggggacggtgcgcatcggcttttcgcttgggcggcgcgaattttcgcgggcgcgttatatttcgggcgtgtcactggtgttaggatggatgctcgccgtgattaccgtgctttccttggtattattccgttcgccgctggtaagtatgtacaacaatgatccggcggttttaagcatcgccgccaccgtcttactgttcgccggcttgttccaaccggcagacttcacccaatgtatcgcctcctacgccttgcgcggctacaaagttacaaaggtgccgatgttcatccacgccgccgccttttggggctgcggcctgctgccgggctacctgctcgcctaccgtttcgatatgggcatttacggcttctggacggcattgattgcctcgctcaccatcgccgccatcgccttggtgtggtgcttggaattgtgcagtagggagatggtcagatcgcataaggtcgtctga

SEQ ID NO: 70913 - DNA, 324 bp, Neisseria meningitidis
atgtttaaggacgaactaaatgaatttatccgattgatatccgatccggaaagtgaattggatgaatggtatttgagtgattttaaagatgaacatatatgggaaatgcaaagttacgaagcattttcatgtttgcgggaagcagtcccctatttgtttgcttatccccgatacgggtatgaactgttggagataatttccgcgttaaaagaaacatctgatacgacagaattattttatgagccgggtatcgtgcctttgctgattgctttatataaagaagatagttatctggtaaatatggtcaaacggatattcaaatga

SEQ ID NO: 70914 - DNA, 1026 bp, Neisseria meningitidis
atggattatcagggtaagaaagaccgattggaagaagttgtcggtctttccgaagaccccgaactttggaacgacccgaaacgcgcccaagaaatcggcaaagagcgcaaaatcctcgaaggcatcgtgttgacgctcgacaacatcgcttcgggcatcgaagacaaccgcatgctgattgaaatgaccgtcgaagaaaacgacgaagaaggttttgccgccgtgcaggaagatgtggcggggctggaaaaacagatggcggatttggagttcaaacggatgttcaaccagcccgccgatccgaacaactgctttatcgacattaccgcaggcgcaggcggtacggaagcggaagactgggcgggtatgctgttccgcatgtacagccgctacgccgagcgcaaaggcttcaaaatcgaaatcctcgaagaagacgacggcgaaatcgcgggcatcaaccgcgcgactatccgagtggaaggcgaatatgcctacggcttgctgcgcacggaaacaggtgttcaccgcttggtgcgttactctccgtttgactcgaacaacaaacgccatacctcgtttgcctccgtgttcgtctatcccgaaatcgacgattccatcgaaatcgaaatcaaccccgccgatttgcgcatcgacacctatcgcgcatcgggtgcgggcggtcagcacatcaacaaaaccgactccgccgtgcgcattacccacgagccgacggggattgtggtgcaatgtcaaaacgaccgttcgcaacacgccaacaaagccgccgcgatggaaatgttgaagtccaaactgtatgaattggaaatgcgcaaacgcaatgaagagaaacaggcgttggaagaaggtaaatccgatgtaggttggggcagccaaatccgttcgtatgttttggattcctcacgtatcaaagacttgcgtacaggctacgaagtcggcaacaccaaagccgtattggatggcgatttggacggctttatcgaagccagcctgaaacagggcgtgtag

SEQ ID NO: 70915 - DNA, 975 bp, Neisseria meningitidis; identical to SEQ ID NO: 55022

SEQ ID NO: 70916 - DNA, 285 bp, Neisseria meningitidis; identical to SEQ ID NO: 45785

SEQ ID NO: 70917 - DNA, 1137 bp, Neisseria meningitidis
  misc_feature 8, 9, 10, 11, 12: 'n' is a, c, g or t
gtgtgtgnnnnnacggaggcggtaatcctttctacctgcaaccgcaccgagctttactgtgtaggcgattcggaagaaatcatccgttggctcgcagactatcacagccttcccatagaagaaatcagcccctacctttatactttggggatgcaggagactgtgcgccatgccttccgcgttgcctgcggcttggattcgatggtgttgggcgagccgcagattttaggacagattaaggatgcggtcagggttgctcaagagcaggaaagtatgggtaagaaactcaatgccctgttccaaaaaaccttttctgttgctaaagaggtccgtaccgatactgccgtcggcgaaaactcggtttccatggcttccgcttccgtcaaattggcggaacagatttttcccgacatcggcgatttgaatgtcttgtttatcggcgcaggcgaaatgattgagctggttgccacttattttgccgccaaaagtccccggctgatgacggttgccaaccggacgctggcgcgtgcacaggagttgtgcgacaagctcggtgtcaacgccgaaccgtgcctgctgtccgatctgcctgctattctgcacgattacgacgtggtggtttcttcaacggcgagccagcttccgatagtcggcaaaggcatggtcgaacgtgcattgaaacagcgtcagagtatgccgttgtttatgcttgatttggccgtgccgcgcgatattgaagcggaagtcggcgatttgaacgatgcctatctttatacggtggacgatatggtcaacatcgtccaaagcggcaaggaggcaaggcagaaggccgccgccgccgccgaaacgctggtatccgagaaggttgccgaatttgtcaggcagcagcagggcaggcagagcgtccccttgattaaagccttgcgggacgagggcgagaaagcgcgcaagcaggtgttggaaaatgcgatgaaacagcttgccaaaggcgcaacggcagaagaggttttggaacggctgtccgtccaactgaccaacaagctgctgcattcgccgacccaaactttgaataaggcgggggaagaagataaagatttggttcatgccgtcgcgcagatttatcatttggacaaataa

SEQ ID NO: 70918 - DNA, 591 bp, Neisseria meningitidis
atggagacgcaggacgacgacacggtcaaggtttggggttacgcttcaagcgaggaaatcgattcggacggcgaagtcatcgcggcggcagctatgaaggcggcgattcccgattatatgaagtttggcgcggggcgcgagatgcacggctcaaacgctgcgggaacggcaattgaaatcaacgttgaagacgacggcataacctttttcggtgctcatatcatcgaccccgttgtcgtgtcgaaagtcaaaacaggcgtttacaaaggcttttccatcggcggcagcgttaccgcccgcgatgatttgaacaagtcgcaaatcacgggcttgaagctgacggaaatcagccttgtcgagcgccctgccaatcccgatgcggtgtctacctgctttaaggcggacaaaggtgcggaagcggtaaacaacgatacagaacataatgctacatattttagccatttcccttccaaacaaaaaagcaccgacggcggccgatgccccttcctttacaggttcccctattttttatccgcgggcagcaccggtttggctgggccttttggtgcgggcgcaccgacggaagcctga

SEQ ID NO: 70919 - DNA, 2847 bp, Neisseria meningitidis
atgtgcaaccatcatccccaacattcgcacgacaacgacaccatccgcatccgcggcgcgcgcacgcataatttgaaaaacatcgatttggacattccgcgccacaagctcgtggtggtaacaggattgtcgggcagcggcaagtcgtcgctggcatttgatactttatatgccgaagggcagcggcgttatgtcgagagcctttctgcctatgcgcggcagtttttgcagatgatggacaagcccgatgtcgatttgatcgaaggcttgtcgcccgcgatctccatcgagcagaaatccaccagccacaatccgcgttccaccgtcggcacggttacggaaatccacgactacctgcgccttttgtacgcccgtgtcggtacgccgtattgtcccgaacacaatctgccgctatccagccaaacagtatctcagatggttgatgccgtgttgaagctgccggaagacacgcgcgtgatgattctggcgccggcggtgcgcgagcgtaagggcgagtttgtcgacttctttgccgacttgcaggcgcagggttttgcgcgcgtgcgcgtggacggcgaagtttatcagttggacgaagtaccgaagctggaaaaaaacatcaagcacaatatcgacgtggtcatcgaccgcgtgaaagtgaaggcgaacatcaagcagcggctggcggaaagttttgaaaccgcgctgcgccacggcaacgagcgcgcgctggcgatggaaatggacagcggcgaagagcattggttttccgcgcgtttcgcctgccccgtatgttcgtacagcctgcccgaattggagccgcgcctcttttcgttcaacaacccgatgggctcctgcccgacttgcgacggcttgggtaacaccaatttcttcgactccgaaaaagtggtcgcgcatcccgaattgtcgctggcttcgggcgcgattgacggctgggacaagcgcaaccagttctatttccaaatgattcagtcgctggcgcggcattacggtttcgacgtgcaggctgcttgggaaaccctacctgcaaaaatcaaaaaagtcgtgttgcacggctcgggcaaagaagtcattgatttcacttacctgtccgaacgcggcaccaccttcaaccgcagccacgccttcgaaggcatcatccccaatctcgaacgccgctaccgcgaaaccgacagcgaaaccgtgcgcgaaaaactgcgcgaataccaaaaccaccgcgcttgcccgagctgcggcggcgcacgtttgcgcaaagaagcccgctacgtttacgtcggcggcgagccgttgcacgaagtttccgcctggccgctgaccaaaacccaccgattctttgaaacgctggatttggacggcaacaaaaaacaaatcgccgaaaaaatcctcaaagaaatcaccgaacgtctcggctttttgattaatgtcgggctggattacctgaatctctcccgttccgccgaaaccctttccggcggcgaagcccagcgcatccgcctcgccagccaaatcggcagcggcctgaccggcgtgatgtacgttttggacgaaccctccatcggcctgcaccagcgcgacaacgaccgcctgcttgccaccctcaaacgcctgcgcgatttgggcaacagcgtcatcgtggtcgaacacgacgaagacgccatccgcgaagccgatttcgtcgtcgatatgggcccgggcgcaggcgaacacggcggcaacgtattgattgccgacacgcccgaaaacgtcgccaaatgcgaaaactccgttaccggacaatacctcagcggcaaaaaatccattgccgtgccgtctgaacgcacgccagtcaatcccgaccgaatgctcgtcctcaaaggcgcgcgcggcaacaacctcaaaaacgttacccttgagctgccgctcggtttgattacctgcatcaccggcgtatccggcagcggcaaatccaccctgattaacgacaccctcgccaaaatcaccgcccgcgaactcaaccgcgcccaagaagaacccgccccatacgacgacatccgcggcctcgaacacctcgacaaagtcatcaacgtcgaccaatcccccatcggccgcaccccgcgctccaaccccgccacctacaccggcctgttcacccccatccgcgaactcttcgccggtgtacccctctcgcgcgaacgcggctacaacgtcggcagattctccttcaacgtcaaaggcggccgctgcgaagcctgccaaggcgacggcgtcatcaaagtcgaaatgcacttcctgcccgacgtgtacgtcccctgcgaagtctgccacggcaaacgctacaaccgcgaaacgctcgaaatccaatacaaaggcaaaaacatcagccaagtcctcgacatgaccgtcgaagaagcccgtgaatttttcgacgccgtccccaccgtatcgcgcaaactgcaaaccttgatggacgtaggcttaggctacatccgtctcggccaatccgccaccaccctctccggcggcgaagcccagcgcgtcaaactcgccttggaactctccaaacgcgacaccggcagaacgctctacatcctcgacgaacccaccaccggcctacacttcgccgacatcgccctgctgctggaagtcatagaccgtctgaaaggcaaaggcaactcgatagtgattatcgagcataatctggatgtgattaaaaccgccgattggattgtggacttagggccagaaggcggcgacggcggagggaggattattgcttcaggtagcccggaggaagtggcgaaggttaaggggagttatactgggaagtatttgaagaatatactttaa

SEQ ID NO: 70920 - DNA, 1260 bp, Neisseria meningitidis; identical to SEQ ID NO: 55931

SEQ ID NO: 70921 - DNA, 702 bp, Neisseria meningitidis
  misc_feature 679, 680, 681, 682, 683: 'n' is a, c, g or t
atgagctacacgcaactgacccaaggcgaacgataccacatccaatacctgtcccgccactgcaccgtcaccgaaatcgccaaacagctgaaccgccacaaaagcaccatcagccgcgaaatcagacggcaccgcacccaagggcagcaatacagcgccgaaaaagcccagcggcaaagccggactatcaaacagcgtaagcgacaaccctataagctcgattcgcagctgattcagcacatcgacccccttatccgccgcaaactcagtcccgaacaagtatgcgcctacctgtgcaaacaccaccagatcacgctccaccacagcaccatttaccgctaccttcgccaagacaaaagcaacggcagcacgttgtggcaacatctcagaatatgcagcaaaccctaccgcaaacgctacggcagcacatggaccagaggcaaagtacccaaccgtgtcggcatagaaaaccgacccgctatcgtcaaccagaaatcccgtatcggcgattgggaagccgacaccattgtcggcaaaggacagaaaagcgcattattgaccttggtcgaacgcgttacccgctacaccatcatctgcaaattggatagcctcaaagccgaagacactgcccgggcagctgttagggcattaaaggcacataaagacagggtgcacaccnnnnncacacacttaattaattaa

SEQ ID NO: 70922 - DNA, 642 bp, Neisseria meningitidis; identical to SEQ ID NO: 54319

SEQ ID NO: 70923 - DNA, 882 bp, Neisseria meningitidis; identical to SEQ ID NO: 52234

SEQ ID NO: 70924 - DNA, 1215 bp, Neisseria meningitidis; identical to SEQ ID NO: 55241

SEQ ID NO: 70925 - DNA, 786 bp, Neisseria meningitidis
gtgaagcatatcagttcggcaaacaatgaacacatcagacacctgcaccgcctgttgtctcaagggaagttcagacggcaatacgcccaaaccgttttggagggcgtgcacctgcttcaggttttcctgcaatccggcgggatgccggtcggggtatatattcccgaagcgaaaatgccgtctgaagaagtccgtaaattgacggcggttttgccggaagacggggttttttccgtttcagacggcatattgaagaaaatcagcagcctgacttgcgcggatgatgtgcttgcgctgattgatattccggatgcgggtgctttgccggccggcggcgactgtgtggttttggacggcgtgcaagatccgggcaatgtcggcacggtgttgcggagcgcggcggcggcaggaatcggcgcggtcgttttgggcaaaggttgtgcggacgcgtggtcgcccaaagtgctgcgagccggaatgggcgcgcatttcttgtcggagatttatccgcaggcggatttggaaatatggttggcgcgttatgaagaccgtgtgtttgccaccgcgttgcgtgaggaaaaacaggcggttctgtataacgaagatttgcgcgaaccgacagcctgggtgtttggcaacgaaggcgcgggtgtcggcaaagcggttttagacagggcggacaagtgcgtcaggataccgatgcacgatgcaaccgagtctttaaatgtcgcgatggcggcgacaatctgcctgtttgaacagatgcggcagcggtcggcgtattga

SEQ ID NO: 70926 - DNA, 1569 bp, Neisseria meningitidis
atgagtcaaaccgatacgcaacgggacggacgatttttacgcacagtcgaatggctgggcaatatgttgccgcacccggttacgctttttattattttcattgtgttattgctgattgcctctgccgccggtgcgtatttcggactatccgtccccgatccgcgccctgttggtgcgaaaggacgtgccgatgacggtttgattcacgttgtcagcctgctcgatgctgacggtttgatcaaaatcctgacgcataccgttaaaaatttcaccggtttcgcgccgttgggaacggtgttggtttctttattgggcgtggggattgcggaaaaatcgggcttgatttccgcattaatgcgcttattgctcacaaaatctccacgcaaactcactacttttatggttgtttttacagggattttatctaataccgcttctgaattgggctatgtcgtcctaatccctttgtccgccatcatctttcattccctcggccgccatccgcttgccggtctggctgcggctttcgccggcgtttcgggcggttattcggccaatctgttcttaggcacaatcgatccgctcttggcaggcatcacccaacaggcggcgcaaatcatccatcccgactacgtcgtaggccctgaagccaactggttttttatggtagccagtacgtttgtgattgctttgattggttattttgttactgaaaaaatcgtcgaaccgcaattgggcccttatcaatcagatttgtcacaagaagaaaaagacattcggcattccaatgaaatcacgcctttggaatataaaggattaatttgggctggcgtggtgtttgttgccttatccgccctattggcttggagcatcgtccctgccgacggtattttgcgtcatcctgaaacaggattggtttccggttcgccgtttttaaaatcgattgttgtttttattttcttgttgtttgcactgccgggcattgtttatggccgggtaacccgaagtttgcgcggcgaacaggaagtcgttaatgcgatggccgaatcgatgagtactctggggctttatttggtcatcatcttttttgccgcacagtttgtcgcattttttaattggacgaatattgggcaatatattgccgttaaaggggcgacgttcttaaaagaagtcggcttgggcggcagcgtgttgtttatcggttttattttaatttgtgcttttatcaatctgatgataggctctgcctccgcgcaatgggcggtaactgcgccgattttcgtccctatgctgatgttggccggctacgcgcccgaagtcattcaagccgcttaccgcatcggtgattccgttaccaatattattacgccgatgatgagttatttcgggctgattatggcgacggtgatcaaatacaaaaaagatgcgggcgtgggtacgctgatttctatgatgttgccgtattccgctttcttcttgattgcgtggattgccttattctgcatttgggtatttgttttgggcctgcccgtcggtcccggcgcgcccacattctatcccgcaccttaa

SEQ ID NO: 70927 - DNA, 129 bp, Neisseria meningitidis; identical to SEQ ID NO: 55518

SEQ ID NO: 70928 - DNA, 363 bp, Neisseria meningitidis
atgaagctgccgcgcaaccgcttcagcctgctttccgcattgtggtttgccggcggcatctattcgctgctcttcaaagctgccgacaccgcgccgccgccgtttccgcatttcgacaaagcagcacaccttgccctgtttttcgcacaaatctggcttttgaccaaagcattcaaaaccggaaaacttcccatcccctaccgcagcctgatggtctttgccctctgtttcgccctcttcagcgaatgcgcgcaggcatggtttaccgcaacgagaaccggcagtttgggcgatgttcttgccgatatggcaggtacggttctcgcactctttgccgcccacgccgccgaccgcccggactga

SEQ ID NO: 70929 - DNA, 390 bp, Neisseria meningitidis; identical to SEQ ID NO: 61823

SEQ ID NO: 70930 - DNA, 2151 bp, Neisseria meningitidis; identical to SEQ ID NO: 61995

SEQ ID NO: 70931 - DNA, 297 bp, Neisseria meningitidis
atgaaaaaatccctgtttgccgctgctttgttgtctttggtcctggcagcctgcggcggtgaaaaagccgctgaagctcccgctaccgaagcacctgccgctgaagctcccgctactgaagcacctgccgctgaagctcccgctaccgaagcacctgccgctgaagctcccgctaccgaagcacctgccgccgaagctcccgctgctgaagctgccgctaccgaagcacctgccgctgaagctgccgctaccgaagctcctgctgccgaagctcctgctgccgaagctgcaaaataa

SEQ ID NO: 70932 - DNA, 873 bp, Neisseria meningitidis
atgcccattttgaaccatattgccctcatcggtgtagggctgatcggcggttcgttcgttctcgacctcaaaaggcagggactcgtccgcaccgttaccggtatcgacaccgaccgcgacaacctcgaacgtgcattggaacgcggcgtgattgaccgtgcgtccgttgccatcgacacggacagcatcggcggtgcggacttggtactgattgccacgcccgtcgccaccgttcccgccattttgaccgcgctgcgccccgttttgccggaacacacttggatttccgatgtcggcagcaccaaatcttcggtcatcgaagccttccgccgctgtctgcccgaccgcctgcaccgctgcatcgccgcccacccgattgccggttcggacagaagcggtgcgcaagccgcgcagttcgggctgttccgccacagaaaactcatcatcacgccacacggcggcgaacattcagacggcattgccttggtagaagaactgtggcacgcggtcggtgcggaaatttatacgatggacgcgcaacgccacgacgcggttttcgccgccgtctcccatatgccccacctgaccgccttcgcctatgtccaccagattctcgaccaccccgacggacaggaatatctgaaattcgccgccacgggctttcgggacttcacccgcatcgcctccggtcatcccgccgtgtgggcggacatctgccttgccaacaaagacagcctgctgcaactggttcaaggcttgggcaaacagttggacgttttggcaaacatcctgaccaccgacgaccgcgaagccctgtaccgctattttgaagaagccaaaaccacacgcgaccgctggctggacggcaactga

SEQ ID NO: 70933 - DNA, 498 bp, Neisseria meningitidis
ttggctgaaggtcaaaaatcagccgtcaccgagtattacctgaatcacggcatatggccaaaaaacaatacttctgccggcgtggcatcctccgccaccgacatcaaaggcaaatatgttaaaagcgttgaagtcaaaaacggcgtcgttaccgccgaaatggcttcaagcggcgtaaacaaagaaatccaaggcagaaaactctccctgtgggccaagcgtcaagacggttcggtaaaatggttctgcggacagccggttgcgcgcaccgacaaagccaccgacgacgtcaaagccgccaccgccaacggcaccgacgacaaaatcaacaccaagcacctgccgtcaacctgccgcgacgcttcatctgccgtttgcatagaaacaccacgcgccgacttcaaacacttccaaaaaatcagccgtcacagagtattacctgaatcacggcatatggcccggcgacaacagttctgccggcgtggcaacctcctctaa

SEQ ID NO: 70934 - DNA, 2733 bp, Neisseria meningitidis
atggcgaataataaaactttgtttgaagtaattgaaaaccgcaaagctgtgtatttggaagacggagatgatgaaaaatacaggctgcctaaatttgtttcaaataatttgaaatatccgttttttgaatggcaaaaatcggctttagaaaactttgtgatttttgaccgcacttcaaaattaaaggattttcccgatatcaaaaaccgccctactcatttgctatttaatatggcaacaggtgcaggcaaaacgatgatgatggcggcattgattttgtattattttgaaaaagggtatcggcattttctgttttttgtgaatcaaaacaatatcgtggataaaacggaaaataattttattgacccgacacacgcaaaatttttatttaccgagaagattttgcagggcgatacggtaattcccattcgcaaagtggaaatgtttagcccacattcagacggcattgaaattaaatttaccagcattcaaaaactatataacgatattcacaccgaacgggaaaaccaaaccacattggcggatttgcataaattgaaccttgtgatgctgggcgatgaagcgcaccatttaaacgccccaactaaaagcaaaaaacgcgatgccgaaattgaacacaaaggctgggagcatatggttttggaattgttactcaataaaaatggcaatcccagcgaaaatgtgctgttggaatttaccgccacgccacctgaaaaagctgacgtgcaacaaaaatacgctgataaaatcatcacaaaatttggtttaaaagaatttttgcaaaaaggttataccaaagaaatcaatttggtatccagtacactgagcaagaaagagcgggtgttgcacgctttattgtttgcttggtatcgccatcaaatcgctttgaaatatggcattgccaatttcaaacctgtgatgttgtttagaagtaagacggttgatgaatcaaaagcggattatttggcatttttaaattgggtagaaaatgtgcaagtagatgatttttcgtttttaaagacattttcaacaagtttaaacgatagcgataacgccaacgaacaaggcaaaacccgcaccgaacaagccctaaaatttatgcaggacaataaatttgggtttgcacatttagcaaattgggtaaaacaaaattatcaaaaacacaatatcattattaccaactccgaaaacaacaaaaccaaaaccgaaaaaaccgacagcgaaacggaaaaattgctaaacaatctggaagcggctgataatccaatccgtgccatttttacggtgggtagattaaccgaaggttgggacgttttaaatttgtttgatattgtgcgtttgtatgaagggcaaaacggcggcggttcaaataaaaaatcatgcaaaacggcaaatacaacggtatcagaaaaacagttgattggtcgaggcgtgcgttattttccatttgcgtttgaaggtaaacagccgaataaacgcaaatttgacaacgacatgcaacacgaattgcgtatcttggaagaattgttttattacgcgcacgatgagcaatcccgctatatttcagaactgaaaaatgagttgcgaaaagacggttatttgcctgaaaaagacgatgataaggtattggcaacatttaaactcaaatctgaatttgccgctaataaggattttagagaattgttaatttgggcgaataaaaaaatccccaacccaaacgccaaaaccaataatgcaaacagcctgcaagccaatccgcaaacgctttcattccaagttcacggcaatcaactgttgcaggaaacgcaatttacagccgatgaaaatgatgaaaaagtcaagcaacttggcacgcaaaataattttactcaaaccataaaaatgagtgaaatggagcggcacattttcaataaagccctgcatatcaaagggaaaaatagtcaatctttattccattttgaccgcctgcaaagcaaactcaatattcaaaatcgcaatgaattgcaaaataaattgttgaaagactggcaaattgaatttttaggattagggcaagacaaacaggtttgcccggacgataaacttgcaggctgcctgaaaatcttggaaatggttgaaaagcatttgaatgaaagtgataagccatttatcggtacaaaagaatttacgcctaaaaaattatgggaaattttcggcacgccaaaacaaaaatgggtcaaaaaagatgatgtaaaaacgactattgccacgcaaaatgattggtatgtgatgaataattttgccggaacgggtttggaagaagcgttaattcaatttatttcagcgcgtttgggcgatttgaaatctcaatatgacattcatttaatccgtaacgaagaagtgtttaaattgaataactttgccaatggcgaaggatttatgcccgactttattttattgctgaaagataaacaaaaatcttcttccaatggcgtgaatgactttttgcattaccaaattttcattgagcccaaaggtgagcatttagtggaaactgatggatggaaagaagaatttttagaagccatcacagtggaatatgggatggataagatcctgcaaaaagatacaccgcattatcgtttgatcggtttaccgttttttactgatcatcagaaaaatggacaatttacggagtcattccctttaggtgcggcatcgcttgaaaaatag

SEQ ID NO: 70935 - DNA, 915 bp, Neisseria meningitidis
atggatgccgtacaattaaaatcatttgtcgccgtcgcgcacgagggcaaccttacccaagccgccaaacgacttttcctttcccagcctgccgtttccgcccaaattaaagcccttgaagaatatgtcggcacgccgctgttcaggcgcacggggaaaggcatggtattgacgcgggcgggcgaaatactgttgcccgaagcggaatccctgctgcaatacaaacacaagctggagcattttgccaaaacgctggcaggcgattattcggaagagaccagtttgggcattatccaccccatcgattcggcaaagctcgtcgcgctgacggacaatatcggtcaaacagcccccaaaacgcgcctgcacatccaatacggaatgagcggcgaaatcctctcgcgcatccaacacaaaaccctgcacggcggctttatactcggcaacgccgcccaacgcggcatccgcagcgtattcctgcaaaacctgacctacgcgctgatttgcccgcaaagccaatatccccatctgacccgctcccttccgcagagcctgcaagaatgcgtatggatagaaatgtcgggcgtgtccggaagtaggaagcacctgcaccagttttggcgcagcaaccggctctcacccaaaaaacagatcttgtgcgactacccccaaaccattatcgatttggttgcaggcggtataggtgtggcaatggtgccgggaaacaaagccgaagcggcggcaaaagaaggcgcgggcgtggctattatcgaatcgtgccgccacagtatgccgctcaatttcatttatgcggaagaatacgaggataatccccacgtctcactcctgctcgagtgcattgaaaaagtatggggagtgcaggcggtgcagccgcccgttgtctcggacaactga

SEQ ID NO: 70936 - DNA, 435 bp, Neisseria meningitidis; identical to SEQ ID NO: 42997

SEQ ID NO: 70937 - DNA, 528 bp, Neisseria meningitidis
  misc_feature 513, 514, 515, 516, 517: 'n' is a, c, g or t
ttggaagacgaagattttattcgcgccgcgtccatgctcgccgaagaagttttcggtttcggtatctacaaagagtccaaaggctcgggcggccgtttttatgagcgctgttggttgatgggttcggaagacgtcctatacggtcgcgtccattttggcggacaaaacaataccattcttttcgaactgaccggcaccggttgcggcgtcgcaaaagaaggctgggaatcacgacttttcgcattcctgactaatgcaatccgcccaaaaatcacacgcgttgacatcgcaaaagactttttcaacggcgaatacagcccgaaccaagcccgtgaagaccgaaataaaggtatgtttacctgtcatcacgtcaaaccaaaaggcgaatgtttggggtcagattgggaagagacgatgaagccaaatgaccaaagcagacctatggtatcggctcccgtgatcgtccaatatgtccgcgtctatgaaaaggcaagcagttgggcgataaaacannnnncacacacttaa

SEQ ID NO: 70938 - DNA, 2595 bp, Neisseria meningitidis
atgtccaaatccgccgtttccccaatgatgcagcaatacctcggcatcaaagcgcaacataccgacaaactggtgttttaccgtatgggcgatttttacgagatgtttttcgacgatgcggtagaagcggcaaaacttttggatattaccctgaccacgcgcggacaggtggatggcgagccggtcaaaatggcaggcgtgccgtttcacgccgccgaacaatatctggcgcgcctggtcaagttgggcaaaagcgtggcgatttgcgaacaggtcggcgaagtcggcgcgggcaaagggcctgtggagcgcaaagtcgtgcgcatcgtaacgcccggcacgctgaccgattccgcattgctggaagacaaggaaaccaaccgtatcgttgccgtgtcccccgacaaaaaatacatcggtttggcgtgggcatcgctgcaaagcggcgaattcaaaaccaagctgacaactgtggataaattggacgacgaactggcgcgcctgcaggcggcggaaattctgttgccggacagtaaaaacgcaccgcaacttcagacggcatcgggtgttacgcgcctgaacgcgtggcagtttgccgccgacgcgggggaaaaactgctgacggaatatttcggctgccaggatttgcgcggcttcggtttggacggcaaagaacacgccgttgcgattggcgcggcaggtgcactgttgaactatatccgtctgacgcaaaacctgatgccgcaacatttggacggcctgtcgctcgaaaccgacagccaatatatcggtatggatgctgccacgcgccgcaatctcgaaatcacgcaaaccctctccggcaaaaaatcgccgaccctgatgtccacgctcgacctttgcgctacccatatgggcagccgcctcttggctctctggctgcaccaccctttacgcaaccgcgcccacatccgagcgcgccaagaagccgttgccgcgctggaaagccaatacaaacccctccaatgccgtctgaaaaacattgcggacattgaacgcattgctgcccgcatcgccgtcggcaacgcccgcccgcgcgatttggcatctttacgcgacagtctgttcgagttggcacaaatcgacttgtccgcaaacggcagcagcctgttggaaaccctcaaagccgttttcccggaaaacctatccacagccgaacagctccgccaagccattttgcccgaaccttccgtctggctgaaagacggcaatgtcatcaaccacggttttcatcccgaactggacgaattgcgccgcattcaaaaccatggcgacgaatttttgctggatttggaagccaaggaacgcgaacgtaccggtttgtccacactcaaagtcgagttcaaccgcgttcacggcttttacattgaattgtccaaaacccaagccgaacaagcacctgccgactaccaacgccggcaaaccctcaaaaacgccgaacgcttcatcacgccggagttgaaagcctttgaagacaaagtgctgactgctcaagagcaagccctcgccttagaaaaacaactctttgacggcgtattgaaaaaccttcagacggcattgccgcagcttcaaaaagccgccaaagccgccgccgcgctggacgtattgtccacattttcagccttggcaaaagagcggaacttcgtccgccccgagtttgccgactatccggctatccacatcgaaaacggccgccatcccgttgtcgaacagcaggtacgccacttcaccgccaaccacaccaaccttgaccacaaacaccgcctcatgctgctcaccggccccaatatgggcggcaaatccacctacatgcgccaagtcgcgctgattgttttattggcacacaccggctgttttgtgcctgccgatgccgccacaatcgggcccatcgatcaaatcttcacccgcatcggcgcatcggacgacctcgcctccaaccgctccactttcatggtcgaaatgagcgaaaccgcctacatcctgcatcacgccaccgaacaaagccttgttttaatggacgaagtcggacgtggcacttccactttcgacggcctcgccctcgcgcacgccgttgccgaacacctgctgcaaaaaaacaaatccttcagcctgtttgccacccactatttcgagctgacctacctgcccgaagcccacgccgccgccgtcaatatgcacctttccgcgctcgaacagggacaggacatcgttttcctgcaccaaatccaaccgggtcccgccggtaaaagctacggcattgccgtcgccaaactcgccggcctgcctgtacgcgcattgaaatccgcccaaaagcatttgaacgaactggaaaaccaagccgccgcgaaccgtccccaactggatattttcagtaccatgccgtctgaaaaaggagatgaaccgaatgtgggcaactttgtggataaagcagaggaaaaacattttgaaggtatattggcagcagccttggaaaaactcgatcccgacagcctgaccccgcgcaaagcattgtcagaactgtaccgtctgaaagatttgtgcaaatccgtatcttaa

SEQ ID NO: 70939 - DNA, 864 bp, Neisseria meningitidis; identical to SEQ ID NO: 55772

SEQ ID NO: 70940 - DNA, 579 bp, Neisseria meningitidis; identical to SEQ ID NO: 55170

SEQ ID NO: 70941 - DNA, 459 bp, Neisseria meningitidis; identical to SEQ ID NO: 54671

SEQ ID NO: 70942 - DNA, 165 bp, Neisseria meningitidis; identical to SEQ ID NO: 54463

SEQ ID NO: 70943 - DNA, 687 bp, Neisseria meningitidis; identical to SEQ ID NO: 54972

SEQ ID NO: 70944 - DNA, 420 bp, Neisseria meningitidis; identical to SEQ ID NO: 55512

SEQ ID NO: 70945 - DNA, 1449 bp, Neisseria meningitidis
atgaaattgcctattcaaaaattcatgatgctgtttgcagcggcaatatcgttgctgcaaatccccattagtcatgcgaacggtttggatgcccgtttacgcgatgatatgcaggcaaaacactacgaaccgggtggtaaataccatctgtttggtaatgctcgcggcagtgttaaaaatcgggtttacgccgtccagacatttgatgcaactgcggtcggccccatactgcctattacacacgaacggacagggtttgaaggcattatcggttatgaaacccatttttcaggacatggacatgaagtacacagtccgttcgataatcatgattcaaaaagcacttctgatttcagcggcggtgtagacggtggttttactgtttaccaacttcatcggacagggtcggaaattcatccggaggatggatatgacgggccgcaaggcagcgattatccgccccccggaggagcaagggatatatacagctattatgtcaaaggaacttcaacaaaaacaaagactaatattgtccctcaagccccattttcagaccgttggctaaaagaaaatgccggtgccgcctctggttttttcagccgtgcggatgaagcaggaaaactgatatgggaaagcgaccccaataaaaattggtgggctaaccgtatggatgatattcgcggcatcgtccaaggtgcggttaatccttttttaatgggttttcagggattgggagttggggcaattacagacagtgcggtaaacccggtaacctatgcggcagcacggaaaactttacagggtattcacaatttaggaaatttaagtccggaagcacaacttgcggccgcaaccgcattacaagacagtgcttttgcggtaaaagacagtatcaactctgccagacaatgggctgatgcccatccgaacattacagctactgcccaaactgccctttccgtagcagaggctgcaggtacggtttggagaggtaaaaaagtagaacttaacccgaccaaatgggattgggttaaaaataacggctataaaaaacctgctgttcgccttatgcagactgtagatggggagatggcaggggggaatagaccgcctaaatctataacgtccaacagcaaagcagatgcttccacacaaccgtctttacaagcgcaactaattggagaacaaattagtagtgggcatgcttataacaagcatgtcataagacaacaagaatttacggatttaaatatcaattcaccagcagattttgctcggcatattgaaaatattgttagccatccaacaaatatgaaagagttacctcgcggtagaactgcgtattgggatgataaaacagggacaatagttatccgagataaaaattctgacgatggaggtacagcatttagaccaacatcaggtaaaaaatattatgatgatttatag

SEQ ID NO: 70946 - DNA, 1284 bp, Neisseria meningitidis; identical to SEQ ID NO: 54474

SEQ ID NO: 70947 - DNA, 1278 bp, Neisseria meningitidis; identical to SEQ ID NO: 55803

SEQ ID NO: 70948 - DNA, 1470 bp, Neisseria meningitidis; identical to SEQ ID NO: 58386

SEQ ID NO: 70949 - DNA, 195 bp, Neisseria meningitidis; identical to SEQ ID NO: 42321

SEQ ID NO: 70950 - DNA, 354 bp, Neisseria meningitidis; identical to SEQ ID NO: 42785

SEQ ID NO: 70951 - DNA, 1398 bp, Neisseria meningitidis; identical to SEQ ID NO: 60574

SEQ ID NO: 70952 - DNA, 285 bp, Neisseria meningitidis
atgacggataccaaattgaacaccaaagaaattttggaactgaaagcgcgcgcgcaccatctccatcctgttgtgatggtcggtcagcagggtctgacggacgcggtcatcaaggaaaccgatgcggcattgacggcgcacgagttgattaaggtgcgcgtgttcggcgacgaccgtgccgaacgtgtcgaaatctgcaatgccttgtgtgaggcggttgatgcgcaacctgttcagcatatcgggaaacttttggtattgtggcgtaagaatatcgaaggctga

SEQ ID NO: 70953 - DNA, 552 bp, Neisseria meningitidis; identical to SEQ ID NO: 38599

SEQ ID NO: 70954 - DNA, 447 bp, Neisseria meningitidis; identical to SEQ ID NO: 60846

SEQ ID NO: 70955 - DNA, 1110 bp, Neisseria meningitidis; identical to SEQ ID NO: 58261

SEQ ID NO: 70956 - DNA, 288 bp, Neisseria meningitidis
atgcaattagagattatcggtagtaaaatttatacggaacaagattttcataatcaaatttcaaaaatattttctatacaagattattatgggaacaatcttgatgctctgtgggatttattaagcacaaatgtagaacgaccgattactttggtatggaaagatgctatgttctcaaaaaataaattagaaaatatatttattgaaatcgtaaatgttctagaaagagttaagaaacaagatgaggattatggattcgaagaaaaatttaattatattttagagtaa

SEQ ID NO: 70957 - DNA, 2013 bp, Neisseria meningitidis
atgaaactcaatccccaacagctcgaagccgtccgttacctcggcggccccctgctcgtccttgccggtgcaggcagcggcaaaaccggcgtaattactcaaaaaattaagcatttgattgtcaatgtcggctatctgccgcataccgtcgccgcaattacctttaccaacaaagccgctgcggaaatgcaggagcgcgtcgccgaaatgctgcccaagtcgcaaacgcgcgggctgacaatttgcacgttccattctttgggcatgaagattttgcgcgaagaggcgaaccatatcggttacaaaaaaaacttttccatcctcgattccaccgacagcgcgaaaatcatcggcgaacttttgggcggtacgggcaaagaagccgtattcaaggcgcagcaccagatttccttgtggaaaaacgatttaaaaacgcctgaagatgtcgttcagacggcctctaatgcgtgggaacaacaaaccgcacgcgtgtatgcgagctatcaggaaaccttacaaagctatcaggcagtggacttcgatgacttaatccgcctgcctgccgtgctgttgcagcaaaacagcgaagtgcgcaacaaatggcagcggcggctgcgttatctgctggttgacgaatgccaagatacgaatacctgccaatttgcgctgatgaaactcttgaccggtgcggaaggtatgtttaccgccgtcggcgacgacgaccagtccatctacgcgtggcgcggtgcgaatatggaaaacctgcgcaaaatgcaggaaaactatccgcagatgaaggtcgtcaaactggagcaaaactaccgctccaccgcgcggattcttaaaatcgccaacaaagtcatcgaaaacaaccccaagctgtttaccaaaaaactttggtcgcaattgggcgaaggcgagccggtcaaagtcgttgcctgccaaaacgagcaacacgaagccgactgggtcgtcagccaaatcatcaaacaaaaactcatcggcggcgacaaaacccaatacgccgatttcgccgtgttataccgcggaaagcatcaggcgaggattttcgaggaagcattgcgcggcgtgcgcatcccctaccggctctccggcggacaaagctttttcgacaaagccgaaatcaaagacgtgttgtcttatgtgcggctgcttgccaaccccaacgacgatcccgcctttctgcgcgccgtaaccacgcccaaacgcggcatcggcgatgtaacgctgggcaagctcaacgcctacgcgcacgaacacgaatgcagcctgtatgaagccgcgcaaaccgaagaagcccttgccacgctgaacaataccaaccgccaacacctgcaagcctttatggatatgttcggcagctaccgcgccaaagccgaaacaggcgaagcaggcgagttcatcaacagcctgctcgaagaaatcgactatgaaaaccacctgcttgccagtgaagaaggcaaagctggcgaaatcaaatggcgcaacgtcggcgatttggtatcatggtttgcgcgaaaaggcggggaagacggcaaaaacatcatcgaactcgcccaaaccgtcgccttgatgacgcttttggaaggaaaagacgaagaagaaaccgatgccgtctcgctatccacgctacacgccgccaaaggtttggagtatccctatgttttccttgtcggttgcgaagaaggtgttttgccgcacaacgacagcatcgaagaaggcaacgtcgaagaagaacgccgcctgatgtacgtcggcatcacccgcgccaaacgccagcttacgctgacccactgcgtcaaacgcaaaaaacaaggcatatggcagttccccgaacccagccgattcatagacgaaatgccgcaggaagatttgaaaatcctggggcgcaaaggcggcgaaccgattgtcagcaaagaagaaggcagacgcaaccttgccgatataatcggaaggctcgacagcatgaaaaaaggcggtccggaggattaa

SEQ ID NO: 70958 - DNA, 1332 bp, Neisseria meningitidis
atgctgttcaaccacaccgcttccgaacttctcgacctctgccgccgcacgctcgacttggcaaaagcagcgggcgcgaccgccgccgaagccgatttcagcgaatcattgggacaaagcgtcagcgtgcggctgggcgaaatcgaacaaatcgagttccagcaggacaagtcgctggacattaccgtttacgtcggcaaacgcaaaggccgcgccagcactgccgacttctccgaaaaagccctgcaagacaccgtcaaagccgccatcgacatcgcccgctacaccgccgaagacgattgcgcaggtttggcagacgcttcgcttatggcgcaacacatcggcgaccccgacctttaccacgaatgggatttggatacggaagccgccgtcgagttggcaaaacaatgcgaacaagccgccctgaacgaggatgagcgcatcgaaaactccgaaggggcggcggtgcaaaccggacattaccaatacgtttacggcaacacccacggttttgccgcacaccagcaaggcacacgccacagcatttcatgcagcgtcgttgccgccgacgaaaacggcatgcagcgcgactactggtacgattcctcctgccgccatcaagacatggacagcccgacgcaaatcggtcaaaccgccgccgaacgtaccttacgtcgtctgaacagccgcagcattccgaccggaagctaccccgtcctattcgatgcgaccgtttcgggaggtctgatcggacacctcgtcggcgcactgtccggcggctcgctctaccgccaaagcagcttcctgatcgacagcataggcaaacaggttctgcccgatttcctcagcctgcgcgaagagccgcatattccccgcgccttcggcagcacctatttcgattccgaaggcgtcgccacgcggccgcgtttcgttatccgcgacggcatcgtcgaaggctatttcctcagcagttacagcgcgaggaaactcggtatgcagaccacgggcaacgccggcggcgcgcacaacctttatctgaaccatacgcacgaaacgcaatcagacctgctgaaagaaatgggcacgggattattggttaccgaactgatgggacagggcgcgaacaccattaccggtgactactcgcgcggcgcggcgggtttttgggtggaaaacggcgtgattgcctaccccgtccacgagattaccgtagccggacgcttgcaggatatgtaccgcgacattgtcggcgtggcggatgacgctttgcggcgttcgtccaacaaaatcggctcgattctgattgcggggatgacggttgccggaagctga

SEQ ID NO: 70959 - DNA, 855 bp, Neisseria meningitidis; identical to SEQ ID NO: 55306

SEQ ID NO: 70960 - DNA, 885 bp, Neisseria meningitidis; identical to SEQ ID NO: 55375

SEQ ID NO: 70961 - DNA, 855 bp, Neisseria meningitidis; identical to SEQ ID NO: 42323

SEQ ID NO: 70962 - DNA, 627 bp, Neisseria meningitidis; identical to SEQ ID NO: 63462

SEQ ID NO: 70963 - DNA, 423 bp, Neisseria meningitidis; identical to SEQ ID NO: 36840

SEQ ID NO: 70964 - DNA, 876 bp, Neisseria meningitidis; identical to SEQ ID NO: 54485

SEQ ID NO: 70965 - DNA, 234 bp, Neisseria meningitidis; identical to SEQ ID NO: 50280

SEQ ID NO: 70966 - DNA, 456 bp, Neisseria meningitidis; identical to SEQ ID NO: 54917

SEQ ID NO: 70967 - DNA, 1170 bp, Neisseria meningitidis; identical to SEQ ID NO: 56149

SEQ ID NO: 70968 - DNA, 666 bp, Neisseria meningitidis; identical to SEQ ID NO: 69601

SEQ ID NO: 70969 - DNA, 744 bp, Neisseria meningitidis; identical to SEQ ID NO: 55280

SEQ ID NO: 70970 - DNA, 1827 bp, Neisseria meningitidis
ttgggcatttcccgcaaaatatcccttattctgtccatactggcagtgtgcctgccgatgcatgcacacgcctcagatttggcaaacgattcttttatccggcaggttctcgaccgtcagcatttcgaacccgacgggaaataccacctattcggcagcaggggggaacttgccgagcgcagcggccatatcggattgggaaaaatacaaagccatcagttgggcaacctgatgattcaacaggcggccattaaaggaaatatcggctacattgtccgcttttccgatcacgggcacgaagtccattcccccttcgacaaccatgcctcacattccgattctgatgaagccggtagtcccgttgacggattcagcctttaccgcatccattgggacggatacgaacaccatcccgctgacggctatgacgggccacagggcggcggctatcccgctcccaaaggcgcgagggatatatacagctacgacataaaaggcgttgcccaaaatatccgcctcaacctgaccgacaaccgcagcaccggacaacggcttgccgaccgtttccacaatgccggtagtatgctgacgcaaggagtaggcgacggattcaaacgcgccacccgatacagccccgagctggacagatcgggcaatgccgccgaagccttcaacggcactgcagatatcgtcaaaaacatcatcggcgcggcaggagaaattgtcggcgcaggcgatgccgtgcagggtataagcgaaggctcaaacattgctgtcatgcacggcttgggtctgctttccaccgaaaacaagatggcgcgcatcaacgatttggcagatatggcgcaactcaaagactatgccgcagcagctatccgcgattgggcagtccaaaaccccaatgccgcacaaggcatagaagccgtcagcaatatctttatggcagccatccccatcaaagggattggagctgttcggggaaaatacggcttgggcggcatcacggcacatcctgtcaagcggtcgcagatgggcgcgatcgcattgccgaaagggaaatccgccgtcagcaacaattttgccgatgcggcatacgccaaatacccgtccccttaccattcccgaaatatccgttcaaacttggagcagcgttacggcaaagaaaacatcacctcctcaaccgtgccgccgtcaaacggcaaaaatgtcaaactggcagaccaacgccacccgaagacaggcgtaccgtttgacggtaaagggtttccgaattttgagaagcacgtgaaatatgatacgaagctcgatattcaagaattatcggggggcggtatacctaaggctaagcctgtgtttgatgcgaaaccgagatgggaggttgataggaagcttaataaattgacaactcgtgagcaggtcgagaaaaatgttcaggaaataaggaacggtaataaaaacagtaactttagccaacatgctcaactagagagggaaattaataaactaaaatctgccgatgaaattaattttgcagatggaatgggaaaatttaccgatagcatgaatgacaaggcttttagtaggcttgtgaaatcagttaaagagaatggcttcacaaatccagttgtggagtacgttgaaataaatggaaaagcatatatcgtaagaggaaataatagggtttttgctgcagaataccttggcaggatacatgaattaaaatttaaaaaagttgactttcctgttcctaatactagttggaaaaatcctactgatgtcttgaatgaatcaggtaatgttaagagacctcgttataggagtaaataa

SEQ ID NO: 70971 - DNA, 774 bp, Neisseria meningitidis; identical to SEQ ID NO: 61725

SEQ ID NO: 70972 - DNA, 1629 bp, Neisseria meningitidis
atgatttctaccaacggcattaccatgcagttcggcgcgaagccgctgtttgaaaacgtatccgtcaaattcggcgaaggcaaccgctacggcttgatcggcgccaacggctcaggcaagtccaccttcatgaaaatcctcggcggcgatttggaacagactgccggcgaagtcgcgattgaaaacggcgtgcgtttgggtaaattgcgccaagaccagtttgcctacgaagagatgcgcgtgctggacgtggtgatgatggggcataccgaaatgtgggcggcgatgaccgaacgcgatgcgatttacgccaacctcgaagccaccgaagacgattacatgaaagccgccgaactggaagccaagttcgccgaatacgacggctacaccgccgaagcacgcgctgccgaattgttgagcggcgtgggcatttccgaagatttgcacaatgcgaccatggcagaagttgccccgggcttcaaactgcgtgtattgctggcgcaagccctgttctccaagccggatgtgctgctgcttgacgaaccgaccaacaacttggacatcaacactatccgctggttggaaggcgtgttgaaccaatatgattctacgatgattattatttcgcacgaccgccactttttgaacgaagtctgcacccatatggcggatttggactacaacactatcaccatctatccgggcaactacgacgattacatgctcgcttctgcccaatcgcgtgagcgcgccctgaaagacaatgccaaggcgaaagaaaaattgcaggaattgcaagaatttgtggcgcggttcagtgccaacaaatccaaagcccgtcaggcgaccagccgtctgaaacaggcagacaaaatcaaatcggagatggtcgaagtcaaaccttccacccgccaaaacccgtatatccgttttgaagccgacgaaaaagccaagttgcaccgtcaggctgtggaagtggaaaaactggcgaaacgctttgaaacccagttgtttaaaaacctgaacttcatcctcgaagcgggacaacgccttgccatcatcggcccgaacggcgcaggtaaatctaccttgctgaaactcttggcaggcgcgtacaaccccgaatattcagacggcctgttaccggacgaaggcaccatcaaatgggcggaaaaagccagtgtcggctactatccgcaagatcatgaaaacgacttcgacgtcgatatggacctgagcgaatggatgcgccaatgggggcaggaaggcgacgacgaacaagtcatccgcggcactttggggcgtttgctcttcggcagtaacgatgtcgtgaaaaaagtgaaggttctctccggtggtgaaaaaggccgtatgctttacggcaaactgttgctgttgaaacccaatgtcttagtcatggatgaaccgaccaaccacatggacatggaaagcatcgaatccttgaacatggcgctggaaaaatacaacggcacgctgattttcgtctcgcatgaccgtcagtttgtatcttcattggctacccaaatcatcgaattggacggtaaaggcggatatgaacactacttgggcgattacgaaagttacttggagaaaaaaggcgtagcataa

SEQ ID NO: 70973 - DNA, 3603 bp, Neisseria meningitidis
  misc_feature 8, 9, 10, 11, 12: 'n' is a, c, g or t
gtgtgtgnnnnntttccggcacaaactgccctgcgccaagcgataaccgatgcctaccgccgtaatgaaatcgaagccgtacaggatatgttgcaacgtgcacagatgagcgacgaagagcgcaacgccgcctccgagcttgcccgccgtttggttacccaagtccgcgccggccgcaccaaagccggcggcgtggatgcgctgatgcacgagttttcactctccagcgaagaaggcatcgcgctgatgtgtctggcagaagccctgctgcgtatccccgacaacgccacgcgcgaccgcctgattgccgacaagatttcagacggcaactggaaaagccatttgaacaacagcccttccctcttcgtcaacgccgccgcctggggcctgctgattaccggcaaactgaccgccacaaacgacagacaaatgagttccgcactcagccgcctgatcagcaaaggcggcgcaccgctcatccgccaaggcgtaaattacgccatgcgcctgttgggcaaacagttcgtaaccggacaaaccattgaagaagccctgcaaaacggcaaagaacgcgaaaaaatgggctaccgcttctccttcgatatgttgggcgaagccgcctacacccaagccgatgccgaccgctactaccgcgactatgtcgaagccatccacgccatcggcaaagatgcggcaggacaaggcgtttacgaaggcaacggcatttccgtcaaactctccgccatacatccgcgctactcgcgcgcccaacacggccgtgtgatgggcgaactgttgccgcgcctgaaagagctgttccttttgggtaaaaaatacgatatcggtatcaacatcgatgccgaagaagccaaccgtctggagctgtctttggatttgatggaggcactcgtttccgatcccgatttggcaggctacaaaggcatcggtttcgttgttcaagcctaccaaaaacgttgtccgttcgttatcgactacctgatcgaccttgcccgccgcaacaaccaaaaactaatgatccgcctcgtcaaaggcgcgtattgggacagcgaaatcaaatgggcgcaagtggacggcttgaacggctatccgacctacacccgcaaagtccacaccgacatctcctacctcgcctgcgcgcgcaaactgctttccgcgcaagacgcggtatttccgcaattcgccacccacaacgcctacaccttgggcgcaatctaccaaatgggcaaaggcaaagactttgaacaccaatgtctgcacggcatgggcgaaaccctgtacgaccaagtcgtcggcccgcaaaacttaggccgccgcgtgcgcgtgtacgccccggtcggcacacacgaaaccctgctcgcctacttggtgcgccgcctgttggaaaacggcgcgaactcgtctttcgtcaaccaaatcgtcgatgaaaacatcagcatcgacacgctcatccgcagcccgttcgacaccatcgccgaacaaggcatccacctgcacaacgccctgccgctgccgcgcgatttgtacggcaaatgccgtctgaactcgcaaggcgtggacttgagcaacgaaaacgtattgcagcagcttcaagaacagatgaacaaagccgccgcgcaagacttccatgccgcatccatcgtcaacggcaaagcccgcgatgtcggcgaagcgcaaccgattaaaaaccctgccgaccacgacgacatcgtcggcacagtcagctttgccgatgccgcgcttgcccaagaagcggttggtgcagccgttgccgcgttccccgaatggagtgcgacacctgccgccgaacgcgccgcctgcctgcgccgtttcgccgacctgctcgaacagcacacccccgcgctgatgatgcttgccgtgcgcgaagcgggcaaaacgctgaacaacgccattgccgaagtgcgcgaagccgtcgatttctgccgctactacgcaaacgaagccgaacacaccctgcccaaagatgccgaagccgtcggcgcgattgtcgccatcagcccgtggaacttcccgctcgccatctttaccggcgaagtcgtttccgcattggcggcaggcaacaccgtcatcgccaaacccgccgaacaaaccagcctgattgccggttatgccgtttccctcatgcacgaagccggcatcccgacttccgccctgcaactcgtcctcggcgcaggcgacgtgggtgcggcattgaccaacgatgcccgcatcggcggcgtgattttcaccggctcgaccgaagtggcgcgcctgatcaacaaagcccttgccaaacgcggcgacaatcccgtcctgattgccgaaaccggcggacaaaacgccatgattgtcgattccaccgcacttgccgaacaagtctgcgccgacgtattgaactccgccttcgacagcgcgggacaacgctgctccgccctgcgtatcttgtgcgtccaagaagacgttgccgaccgtatgctcgacatgatcaaaggcgcgatggacgaactcgtcgtcggcaaaccgattcagctcactaccgatgtcggccccgtcatcgatgccgaagcacagcaaaacctgttgaaccacatcaacaaaatgaaaggcgttgccaagtcttaccacgaagtcaaaaccgctgccgatgtcgattccgaaaaatccacgttcgtccgccccatcctgtttgaattgaacaacctcaacgaactgcaacgcgaagtcttcggccccgtcctgcacgtcgtccgctaccgcgccgacgaactcgacaacgtcatcgaccaaatcaacagcaaaggctacgccctgacccacggcgtacacagccgcatcgaaggcacggtacgccacatccgcagccgcatcgaagccggcaacgtttacgtcaaccgcaacatcgtcggcgcagtcgtcggcgtacagcccttcggcggacacggtctgtccggcacaggccccaaagcaggcggttcgttctacctgcaaaaactgacccgcgccggcgaatgggttgccccgaccctgagccaaatcggacaggcggacgaagccgcactcaaacgcctcgaagcactggttcacaaactgccgttcaacgccgaagagaaaaaagccgcagcggccgctttgggacacgcccgcatccgcaccctgcgccgtgccgaaaccgtccttaccggaccgaccggcgagcgcaacagcatctcatggcacgcgccaaaacgagtttggatacacggcggcagcacggttcaagcctttgccgcactgaccgaacttgccgcctccggcgtacaggcagtggtcgaacccgacagcccgctggcttcctacaccgccgacttggaaggtctgctgctggtcaacggcaaacccgaaaccgtcggcatcagccacgttgccgccctgtcgcctttggacagcgcgcgcaaacaggaacttgccgcccacgacggcgcactcatccgcgtcctcccttcggaaaacggactcgacatcctgcaagtttttgaagaaatctcttgcagcgtcaacaccacagccgccggcggcaacgccagcctgatggcggttgccgactga

SEQ ID NO: 70974 - DNA, 282 bp, Neisseria meningitidis; identical to SEQ ID NO: 55698

SEQ ID NO: 70975 - DNA, 252 bp, Neisseria meningitidis; identical to SEQ ID NO: 39189

SEQ ID NO: 70976 - DNA, 2937 bp, Neisseria meningitidis
ttgcaggaaaggccgtatgctaccgcatactggcctttttctgttagggaaagttgcacttcaaatgcgaatccgccgccgtctgaaaacattaccgataaaacccgaaaaatccacgacgaccatatttacgatttcgcttttgatgacggccgtctgaaaaatatttatctgctggacaaaaaaaaccttgcccgcaaccatgtgcagcttatcaaccagtttgagcagacgggcacgcatgcaaaccgctatgacgttaccgtgttggtaaacggcttgccgctggtgcagattgaattgaaaaagcgcggcgtggcggtgcgcgaggcattcaatcaggtgcaccgttacagcaaagagagcttcaacagcgaaaattcgctgttcaaattcctgcaaatcttcgtgatttccaacggcacggatacgcgctatttcgccaacaccaccaagcgcgacaaaaacagcttcgatttcacgatgaattgggcgcggtcggacaatcatccgattaaggatttgaaagactttactgccacgttcctgcagaaaagcgtattgctgggcgttttgctgcattacagcgtgttcgatgcgaatgatacgctgctgattatgcggccgtaccagattgccgccgccgaacgcattttgtggaaaatcaacagttcggcgcaggcgaagaattggagcgggccggaaagcggcggctatgtctggcacaccacgggcagcggcaaaacgctgaccagcttcaaggcggcgcgtctggcgacggaatcggcgtttatcgacaaggttttcttcgtggtggacaggaaggatttggactatcagacgatgaaggaataccaacgtttttcgaccgacagcgtgaacggttcggaaagcacggcgggcttgaaacgcaatttggaaaaagacgacaacaaaatcatcgttaccaccatccagaagctgaacaacctgatgaagagtgaagataatctgccggtttatcaccagcaagttgtctttattttcgacgaatgccaccgttcgcaattcggcgaagcgcaaaaaaacctgaaaaagaaatttaaaaaattctgccagttcggttttaccggtacgccgatttttcatgaccatatcgttgatggcaaactgattatgaaaggcaatgcgcttggttcggagagtacggaaagcgtatttgggagacagctgcattcttatgtgattaccgatgccatccgcgatgaaaaagtattgaaattcaaagtggattacaacgatgtgcgcccgcagttcaaagccgtggaagcggaacaggacgagaagaaactgagtgccgccgaaaaccgccaagccctgctgcatcctgaacgcatccgcgaaatcacgcaatatatcctgaaccagttcaggcagaaaacacaccgcttgaatgcgggcggcaaaggctttaacgccatgtttgccgtcagcagcgtggatgcggcgaagtgctattacgaagcgttcaaaacacaacaggcaggcagcctgcacccgctgaaagtggccaccattttttcctttgccgccaacgaagagcaaaacgccgtcggtgaaattgccgatgaaacctttgaaccggaagcgatggacagcagcgcaaaagaatttttgcaggctgccatcaacgattacaacgcctgtttcaaaaccaatttcggcacggacagcaaagcctttcagaactactaccgcgatttggcaaaacgggtaaaaaatcaggaagtggatttgctgattgtggtcggcatgtttttgacgggttttgacgcgccgacgctgaacacgctgtttgtcgataaaaacctgcgctatcacggcctgatgcaggcgttttcgcgcaccaaccgcatttacgatgccaccaaaaccttcggcaacattgtctgcttccgcgatttggagcaggcaaccattgatgcgattaccttgtttggcgacaaaaacaccaaaaatgtagtgctggaaaaaagttacgaagaatacatgaacggctataccgacagccagaccggcgaagcgcgacgcggctatttggatgtggcaaaagaattgcacgagcgtttccccgatcccgacaaaatcgaaacggaaaaagacaaaaaagattttgccaaactcttcggcgaatacctgcgggcggaaaacgtattgcagaactacgatgaatttgccgcgctgcgcgagttgcagagtgtggacgcggcggacgaagatgcgatgaaggcgtttcaagaaaaatactacctgagcgatgaagacgtgcaggaaatgcggcaagtgccgatgccgtctgaaagggcggtgcaggactaccgttccgcctacaacgacatccgcgattggttgcgccgccaaaaagcaggcgaacagaaagaacagtcaaaaatcgactgggacgatgtggtttttgaggtggatttgctcaaatcgcaggaaatcaatctggattacatcttgcaactgattttcgagcatcacaaaaaaatcaaaggcaaagcggagctggtggaagaaatccgccgtatcatccgcgccagtatcggacaccgcgccaaagagagcctgattgtggatttcatcaacgatacggatttggataaagtccccgatgttcccgccatactggaaaccttctacacctacgctcaagaggtgatgaggaatgaagccgcagagctgattgccgccgaaggtttgaacgaaaccgccgccaaacgctatttaatcagctcgctcaaacgcggctatgccagcgaaaacggtacggaactgaccgaaaccatgccgaaaatgagtccgctcaacccgcaatatctgacgaagaaacaaagtgtttttcaaaagattgcggcgtttgtggagaagtttgccggaatagggacagatatttga

SEQ ID NO: 70977 - DNA, 462 bp, Neisseria meningitidis; identical to SEQ ID NO: 54336

SEQ ID NO: 70978 - DNA, 303 bp, Neisseria meningitidis; identical to SEQ ID NO: 46295

SEQ ID NO: 70979 - DNA, 378 bp, Neisseria meningitidis; identical to SEQ ID NO: 53475

SEQ ID NO: 70980 - DNA, 828 bp, Neisseria meningitidis; identical to SEQ ID NO: 54360

SEQ ID NO: 70981 - DNA, 1467 bp, Neisseria meningitidis; identical to SEQ ID NO: 43542

SEQ ID NO: 70982 - DNA, 1221 bp, Neisseria meningitidis; identical to SEQ ID NO: 55321

SEQ ID NO: 70983 - DNA, 816 bp, Neisseria meningitidis; identical to SEQ ID NO: 44574

SEQ ID NO: 70984 - DNA, 231 bp, Neisseria meningitidis; identical to SEQ ID NO: 55669

SEQ ID NO: 70985 - DNA, 246 bp, Neisseria meningitidis; identical to SEQ ID NO: 44126

SEQ ID NO: 70986 - DNA, 1098 bp, Neisseria meningitidis; identical to SEQ ID NO: 54808

SEQ ID NO: 70987 - DNA, 810 bp, Neisseria meningitidis
atgagaccatatgctactaccatttatcaactttttattttgtttattgggagtgtttttactatgacctcatgtgaacctgtgaatgaaaagacagatcaaaaagcagtaagtgcgcaacaggctaaagaacaaaccagtttcaacaatcccgagccaatgacaggatttgaacatacggttacatttgattttcagggcaccaaaatggttatcccttatggctatcttgcacggtatacgcaagacaatgccacaaaatggctttccgacacgcccgggcaggatgcttactccattaatttgatagagattagcgtctattacaaaaaaaccgaccaaggctgggttcttgagccatacaaccagcaaaacaaagcacactttatccaatttctacgcgacggtttggatagcgtggacgatattgttatccgaaaagatgcgtgtagtttaagcacgactatgggagaaagattgcttacttacggggttaaaaaaatgccatctgcctatcctgaatatgaagcttatgaagataaaagacatattcctgaaaatccatattttcatgaattttactatattaaaaaaggagaaaatccggcgattattactcatcggaactatcataggtatggagagaacgattacagcactagcgtaggttcctgtattaacggtttcacggtacggtattacccgtttattcgggaaaagcagcagctcacacagcaggagttggtaggttatcaccaacaagtagagcaattggtacagagttttgtaaacaatccaagtaaaaaataa

SEQ ID NO: 70988 - DNA, 708 bp, Neisseria meningitidis; identical to SEQ ID NO: 55038

SEQ ID NO: 70989 - DNA, 1134 bp, Neisseria meningitidis
atgaaaagaatcttttgcattacaggtaccagagccgacttcggcaagctaaaacctttattagcctatattgaaaatcacccagaccttgaattgcatttgattgtaactggtatgcatatgatgaaaacatatggcagaacctgcaaggaagtaactcgagaaaactatcaacatacatatctgttttcaaatcaaatccaaggtgaaccaatgggtgtcgttttaggcaataccattacgtttatctctcgtctatctgatgaaattgaacctgatatggtcatgattcacggcgaccgtttagaagcactagcaggcgcaactgtaggtgcattaagcagccgtttagtttgccatatcgaaggtggtgaactatctggtacagtagatgactccattcgtcattctattagtaaactttctcatatccacttggtagcaaatgaacaagctgtcactcgcctagtgcaaatgggagaaaaaagaaagcatattcacatcatcggctcccccgatttagatgttatggcctcttccaccctcccatccttagaagaagtcaaagaatattacggtttaccatacgaaaattatggtatttctatgtttcaccccgtgactacagaagcacatttaatgccacaatatgcggcccaatatttcaaagcattagaattaagtggccaaaatatcattagcatttaccctaacaacgacacgggtactgaaagtattttacaagagttattaaaatgtcaatctgaaaaatttatcgcatttccatctatacgatttgaatactttttagtcttattgaaacatgctaaatttatggtcggcaactcaagtgcaggtattagagaagctcctctctacggtgtcccttcaattgatgttggtacacgccaaagtaaccgccatatgggaaaatctattattcatacagattatgaaactaaaaatatctttgatgcgattcaacaagcatgcagtttaggcaaatttgaagcagatgatacctttaatggcggagatactcgcaccagcacagaaagatttgctgaagtaatcaacaatcctgaaacgtggaatgtttctgctcaaaaacgttttatcgatttgaatctttaa

SEQ ID NO: 70990 - DNA, 321 bp, Neisseria meningitidis; identical to SEQ ID NO: 43250

SEQ ID NO: 70991 - DNA, 771 bp, Neisseria meningitidis; identical to SEQ ID NO: 61750

SEQ ID NO: 70992 - DNA, 291 bp, Neisseria meningitidis
gtggaatattttatgttgctggcaacagacggggagaatgtgtatgaagcgcgtatggcggcacgtcccgaacacctcaaacggctggagacgctgaagtcggaaggccggctgttgacggcaggtccgaatcctttgccggaggactccaaccgcgtttcgggcagtttgattgtggcgcagttcgagtctttggatgcggcagaggcgtgggcggaagacgatccctatgttcatgcaggcgtgtacagcgaagtgctgatcaagccgtttaaagtggtgttcaaataa

SEQ ID NO: 70993 - DNA, 1299 bp, Neisseria meningitidis; identical to SEQ ID NO: 61235

SEQ ID NO: 70994 - DNA, 1479 bp, Neisseria meningitidis
atgaaatacaaagacctgcgcgacttcatcgccatgctcgagcagcagggcaaactcaaacgcatcgcgcaccccgtttccccgcatttggaaatgaccgaaatcgccgaccgcgtgctgcgcgccgaagggtcggcattgttgtttgagaatccgattaagcccgacggtacgcgctacggttatcctgtgttggcaaacctgttcggcacgcccgaacgtgtggcgatgggcatgggcgcggacagcgtgtccaagctgcgtgaaatcgggcagacgctggcgtatttgaaagaacccgaaccgcccaaaggcatcaaagatgcgttttccaaactgccgctactgaaagacatttggagcatggcgccgaacgtggtgaaaaacgcgccgtgtcaggaaatcgtgtgggaaggcgaaaacgttgatttgtataaacttccgattcagcattgctggccggaagacgttgcgccgctggtaacatggggcttgaccgtaacgcgcgggccgcacaaaaaacgccaaaatctcggcatttaccgccaacaactcatcggcaaaaacaagctgattatgcgctggctgtcgcatcgcggcggcgcgttggattatcaggagttccgcaaactcaatcccgatacgccgtatcccgtcgccgtcgtgctcggttgcgaccctgccactattctcggagcggtaacgcctgttcccgatactttgagcgaataccagtttgccggactgctgcgcggttcgcggacggagctggtgaaatgtatcggcaacgatttgcaagtgcctgcccgtgctgaaattgtattggaaggcgtgattcatccgaacgaaaccgcgttggaaggcccatacggcgaccacaccggctattacaacgagcaggatcatttccctgtatttacggtcgagcgcatcaccatgcgcgaaaacccgatttaccattcgacctacacaggcaaacctcccgatgaacccgctgttttgggcgtggcattgaacgaagtgttcgtaccgctcttgcaaaagcagttccccgaaatcaccgatttttacctgccgcccgaaggctgctcctaccgcatggcggtggtgagcatgaaaaaacagtacgccggacacgccaagcgcgtgatgatgggctgctggtcgttcctgcgccagtttatgtacaccaaattcatcatcgtggtggatgacgatgtgaacgtgcgcgactggaaagaagtcatctgggcggtaaccacgcgcatggaccccgtgcgcgacaccgttttggtggaaaacacgcccatcgactatctcgacttcgccagcccggtcagcggactcggcggcaaaatgggcttggacgcaaccaacaaatggccgggagaaaccgaccgcgaatggggacgcgtcatcaaaaaagaccctgcggttacggctaagattgatgggatttgggaggaattggggttgtag

SEQ ID NO: 70995 - DNA, 660 bp, Neisseria meningitidis; identical to SEQ ID NO: 36652

SEQ ID NO: 70996 - DNA, 1338 bp, Neisseria meningitidis
atgagtaaccatacttcttggtcgtccaaaatcggtttcgtgcttgctgcggcaggttcggccatcggtttgggcgcgatttggaaatttccttatacggcaggcaccaacggcggcgcggtgtttttcctgctgtttttgatatttaccgtcttggtcgccctgcccgtccagcttgccgagttttatatcgggcgcacaggcggtaaaaatgccgtcgattccttcagggctctgcgtccgggcacgcaatggctttgggtcgggcgcatgggcgttgccgcctgctttattttgctgtcgttttacagcgtggtcggcggatgggtattgaattatgtcgtccacagttttacaggggcaatccatgcaggagcggactttgaagccctgttcggcacaacgatttccaatccggcaggttcgctgtcctatcaggcactgtttatgctgattacggtttgggtggtcaaaggcgggatttcagacggcattgaaaaggcaaaccgttatctgatgccggggctgtttatcctctttattgcgctggcaatccgttcgctgacgctgccgggtgcaatggagggcgtgtctttcctgctcaaaccgaattggtcgtactttaaagccgatacgatgattacggctttgggacaggcgttttttgccctgagcatcggcgtttccgccatgattacctacgcttcatatttgggaaaagatcaggatatgttccgttccggccatacgattatgtggatgaacctcttggtttcgctgcttgccggcctggtgatttttccggcggtgttcgccttcggttttgaaccgagccaggggccgggattgatttttatcgtattgcccgcagtgtttatgaagatgccgttcggtacggttttgtttgcggtattcatgcttctggtcgttttcgccacgctgacttccgcattttcgatgttggaaacggtcattgcctcaaccatccgccaagacgagcgcaaacgcaaaaagcacacttggcttatcggcacggctattttcattgtcggcatcccgtccgcgctgtctttcggcgtatggggtgagtttaaggttttcggcaaaaccatttttgatttgtgggactatgttatttccgccgtcattatgccgattggtgctttgagtgtttccatctttaccgcctggattcaggacaagcagtctgtgttaaaagatgccggatcgggcagcaccgtaccacgggcagtgctgctgctgtggctgaataccttgcgctaccttgccccgattgccattattattgttttcatcaattctttgggcatcctttaa

SEQ ID NO: 70997 - DNA, 252 bp, Neisseria meningitidis; identical to SEQ ID NO: 51270

SEQ ID NO: 70998 - DNA, 1443 bp, Neisseria meningitidis
atgcatccgacctattccgccgtacaggcgcggctgctcgaagccaaccgcctttcccccgaactgctcgccaaaagcctgtgcatcatcggcgcgcaccacgtcgattacgccgacatctactgccagcgcaccgcttatgaaagctggcatttggaagagggcatcgtcaaatcgggcagcttccaaatcaatcagggcgtgggcgtgcgcgccgtttcgggcgataaaaccgcctttgcctacgccgacagcctgtgcatcgattcgataaaccgttccgcccgcgccgtccgcgcgattggggcggcaggcggcaaggtgtccgccaaaatgccgtctgaaacgcgcggcaagccggtttgttccgcgtccgaccccattgccggcctcgattccgccgccaaagtcgcgctgttgaacaaagtggaagcaatcgccaaagccgccgatccgcgcatcgtgcaagtgatggccggtttgacctgcgaatacgacatggtttacctcgcccgtctggacggtaaacacgccgccgacatccgcccgatggtgcgcatgaacgttaccgttatcgccaaacagggcgaacgccgcgaacagggcagcgcgggcggcggcggacgctacgacttggcttatttcgatgaaaacttggtgcatcggtttgtcgattccgccgtcaaacaagccctgaccaatcttgaatcccgtcctgcgcctgccggcgaaatgaccgtcgttttgggcaacggctggccgggcgtgttgctgcacgaagcggtcggacacggtttggaaggcgatttcaaccgcaagggaaccagcgtcttttccggccgaatcggcgagcgcgtcgccgccaaaggcgttaccgttgtggatcaaggcgatattgccggccggcgcggttcgctcaacatcgacgacgaaggcaacgaaacccgccgcaccgtattgattgaagacggcatcttggtcggttatatgcaggacgaaaccaatgcccgcctgatgggcacgcaatcgaccggcaacggccgccgcgaaagctacgcctccgtccctatgccgcgcatgaccaatacctttatggaaaacggcggctacgaacccgacgaaatcatcgcgtccatcgacaaaggcatttacgccgtcaacttcggcggcggacaggtggacattaccagcggcaaattcgtgttcagcgcgtccgaagcgtggtgggtggagggcggcaggctgcaataccccgtcaaaggcgcgaccattatcggcaacggccccgaagtgctgaaacacgtttccatgataggcaacgatactgcgctcgacagcggtgtcggcgtgtgcggcaaagaagggcagagcgtccccgtcggcgtggggcaaccgactttgcggattgatgccggactgaccgtcggcggcagcgcaatctga

SEQ ID NO: 70999 - DNA, 1422 bp, Neisseria meningitidis; identical to SEQ ID NO: 55200

SEQ ID NO: 71000 - DNA, 477 bp, Neisseria meningitidis; identical to SEQ ID NO: 54610

SEQ ID NO: 71001 - DNA, 198 bp, Neisseria meningitidis; identical to SEQ ID NO: 37567

SEQ ID NO: 71002 - DNA, 648 bp, Neisseria meningitidis; identical to SEQ ID NO: 50124

SEQ ID NO: 71003 - DNA, 1017 bp, Neisseria meningitidis; identical to SEQ ID NO: 55825

SEQ ID NO: 71004 - DNA, 141 bp, Neisseria meningitidis; identical to SEQ ID NO: 70565

SEQ ID NO: 71005 - DNA, 642 bp, Neisseria meningitidis; identical to SEQ ID NO: 62013

SEQ ID NO: 71006 - DNA, 360 bp, Neisseria meningitidis; identical to SEQ ID NO: 52616

SEQ ID NO: 71007 - DNA, 765 bp, Neisseria meningitidis; identical to SEQ ID NO: 61387

SEQ ID NO: 71008 - DNA, 861 bp, Neisseria meningitidis
atgaaaccctattccgccaatcccaacctgaccgaaccgcgccggctgcgcgttttgctgattgccgccgcgctgggctttctgctgctgatgctggtcgtgccgctcgtcgccgtgttttacgaagccttaaaaggcggttgggatttgtacctaaaatccttaaacgatcccgaagcgtggtctgccatcaaattgacgctgattaccgcgctgattgtcgtccccgtcaatgccgtcttgggcgtggcgatggcgtggctgctgacccgttttgattttcgcggcaagcagttgctgactaccctgctcgatttgccgttttccgtatcgcccgtggtggccggtttaatgttcgtcttattgttcggcgcgcacacggcattgggcggccggctcgaagcgcaaggcatacagattatcttcgccatccccggtattgttttggcgacgctgttcgttaccttcccctttgtcgcacgcgaaatcatcccgctgatgcaggctcagggcgacagcgaagaacaggcggcattgatactcggcgcaagcggctggcagatgttttggcgcgttaccctgcccaacatcaaatgggcgttactctacggcatcatcctcaccaacgcccgcgcgatgggcgagttcggcgcggtcagcgtggtatcgggacacatacgcggcgaaaccaacaccgtcccgcttttggtcgaaatcttctacaacgaatacaacttcaccggcgcattcgccctctccggcgtattggcacttttggcactggcgacgctggcggtgcagaacatcatcaccaaattacaagacaaaaaactcgccgccgccgaaaggaacgcagtatga

SEQ ID NO: 71009 - DNA, 1131 bp, Neisseria meningitidis
atgattaaaatcagcacccgcttcgatgccggctcggtcgtcgtcaaagacctgaccgatccttccaacatccgcctcgccctgcgtcccgacaacgcctccgattttgcacaatggttctacttccggctgcaaggcgcggcatatcaaaactgcatcatgcattttgaaaacgcggcagaagccgcctacccgaaaggctgggaaggctatcaggcgtgtgcctcatacgaccgccgcaactggttccgcgtaccgacttcctacgaaaacggtgtactgaccgtcaatcatacgccgctgtccaacagcgtgtattacgcctatttcgaaccttactccgaagaacagcatttaaacctcctcggcgacgcgcaaggcagcggcctgtgccgcatcgacgacttgggcagcaccgtgcaagggcgcgacatcaatctgctgaccatcggcaatcaggtcgaaagcgatctgaaaatctggattaccgcccgccagcatccgggcgaaaccatggcggaatggtttgtcgaggggctgctcggcaggctgctcgatccgcaagacccgacagcgcgcaccctgctcgaccgcgccacgttctatatcgtccccaatatgaaccccgacggttcggcactgggcaaccttcgtaccaacgccgccggtgcgaacctcaaccgcgaatgggaaaatccgactttggaaaaaagccccgaagtgttcttcgtgcgcgaaaaaatgctggaaaccggcgtggatttgttcttggacatccacggcgacgaagggctgccctttatctttgttgcaggaactgaaggcgtgccaaactacaatccgcgcatttccgcgttggaaacacagttcaaaaccgcccttttgaacgccagccccgatttccaagacgaatacggttacgaaaaagatgcgcccggtcaggcaaacatgaccttggcaacaaactgggtcggcaaccgtttcaactgccttgcctatacgttggaaatgccgttcaaagacaatgccaacctgcccgacgacgatttcggatggaacggtcaacggtcgttgcgcttgggcgaagccgcgttgtccgccatcctcaacatcatcggcgatttgcgctga

SEQ ID NO: 71010 - DNA, 372 bp, Neisseria meningitidis; identical to SEQ ID NO: 61473

SEQ ID NO: 71011 - DNA, 423 bp, Neisseria meningitidis; identical to SEQ ID NO: 54466

SEQ ID NO: 71012 - DNA, 819 bp, Neisseria meningitidis
atgaaaaaaacagtttttacatatgccatgatcgccctgaccggtactgccgccgctgcacaagagcttcaaaccgctaatgagtttaccgtccacaccgacctctcttccatttcttcaactcgtgctttcctgaaagaaaaacacaaagctgccaaacacatcggcgtacgtgctgatattccttttgatgccagccaaggcatccgcttggaagccggtttcgggcgcagcaaaaaaaatattattaatttggaaacagatgagaacaagctgggtaagactaaaaatgtaaaactgcccaccggcgttcctgaaaaccgtatcgatctttacacaggctacacctatacccaaacgttaagtgattctttaaatttccgtgtgggtgccggcttgggttttgaatcttcaaaagacagcattaaaaccaccaagcatacgcttcacagcagccgtcagtcgtggtcagccaaagttcacgcggatttgctttcccaactgggtaacggctggtatatcaacccttggtctgaagtgaaatttgacctcaagtcccgctataaattaaacaccggcgttaccagtctcaaaaaagacatcaatcaaaaaaccaacggctggggctttggattgggtgcaaatattggtaaaaaactgggcgaatccgccagcatcgaggcggggccgttctacaaacaacgcacttacaaagaatccggcgagtttagtgtaacaaccacgagtggcgacgtatcgctcaccatcccgaaaaccagtattcgtgaatacggcttgcgcgtcggcataaaattctga

SEQ ID NO: 71013 - DNA, 357 bp, Neisseria meningitidis; identical to SEQ ID NO: 55054

SEQ ID NO: 71014 - DNA, 756 bp, Neisseria meningitidis; identical to SEQ ID NO: 51882

SEQ ID NO: 71015 - DNA, 225 bp, Neisseria meningitidis; identical to SEQ ID NO: 61071

SEQ ID NO: 71016 - DNA, 456 bp, Neisseria meningitidis; identical to SEQ ID NO: 40384

SEQ ID NO: 71017 - DNA, 618 bp, Neisseria meningitidis; identical to SEQ ID NO: 55231

SEQ ID NO: 71018 - DNA, 729 bp, Neisseria meningitidis; identical to SEQ ID NO: 55291

SEQ ID NO: 71019 - DNA, 558 bp, Neisseria meningitidis
atgatcaacgatattcaaaaaacagccgaaggcaaaatgcagcgttcggtcgaagtactgaaagaaaatctggcgaaagtgcgtaccggccgcgcgcataccggcctgctcgaccaagtggaagtcgaatactggggcagcatggtccccgtcagccaagttgccaacgtaacgcttctggacgcgcgcaccatcggcgtgaaaccgtttgagggcaatatggcggtcaaagtcgagaaagccatccgcgattcaaacttggggctgaacccggcagctgtcggcgacctgatccgcgtgccgatgcccatgctgaccgaagaacgccgcaaagacctgattaaagtcgtacgcggcgaagcggaagaaggccgcgtctccatccgcaacgtgcgccgcgatgccaacgaccacatcaaaaaactcctcaaagacaaagaaatttccgaagacgaggcacgtcgcggcgaagaagcggttcaaaaactgaccgacaaatacattaccgaagccgacaaactcctgactgccaaagaagaagatttgatggcaatttaa

SEQ ID NO: 71020 - DNA, 975 bp, Neisseria meningitidis; identical to SEQ ID NO: 55131

SEQ ID NO: 71021 - DNA, 507 bp, Neisseria meningitidis
atgcccctactagacagtttcaaagtcgatcacacccgtatgcacgcccccgccgtacgcgtggcgaaaaccatgaccacgcccaaaggcgacaccattaccgtattcgacctgcgtttctgcgtgcccaacaaagaaatcctgcccgaaaaaggcatccacacgctggagcatttgttcgccggttttatgcgcgaccacttgaacggcaacggcgtggaaattatcgacatttccccgatgggctgccgcaccggtttctacatgagccttatcggcacgccttccgaacagcaggtcgccgatgcatggctcgcctcgatgcaggatgtgggcaatgtcaaagaccaaagcaaaatccccgagttgaacgaataccaatgcggcacttatcaaatgcactcgctcgccgaagcgcagcaaatcgcgcaaaacgtgttggcgcgcaaagtggcggtgaacaaaaacgaagagctgacgctggatgaagggctgctgaacgcctaa

SEQ ID NO: 71022 - DNA, 972 bp, Neisseria meningitidis
atgtccgccaagttccaacaagaaaccctcaaatcccgtttcgcgcaagccaaagtcctggttgtcggcgacgtgatgctcgaccgctattggttcggcgatgtgtcccgtatttcgcccgaagcccccgtgccggtggcgaaaatcggacgaatcgaccaacgcgcgggcggagcggcgaacgttgcgcgcaacatcgcttcgttgggcggcagggcagggctgttgtccgtaaccggcaacgacgaagccgccgacgcgctcgatgcgctgatggtgcaggacggcgtcgcctcctatctgatgcgcgacaaacaaatcgccaccaccgtcaaactgcgcgtcgtcgcccgcaaccagcagcttatccgccttgattttgaagaacatcctaaccgcgaagtgttggaacaaatcaagcggaaataccgcgaaatcttgcccgaatacgacgcaatcattttttcagactacggcaaaggcggcctgtcgcacatctccgatatgatcgattgggcgaaacacgccggcaaaaccgtattaatcgaccccaaaggcgacgattacgaaaaatacgccggcgccacgctgattacgcccaaccgcgccgaattgaaagaagtggtcggcagttggaaaaacgaaggcgagttgaccgaaaaagcgcaaaacctgcgccgccacctcgatttgaccgcgattttgctgacccgaagcgaagaaggcatgaccttgttcagtgaaggcgaaccgatttaccagcccacccgcgcccaagaagtttacgacgtatccggtgcgggcgacaccgtcattgccggaatgggcttgggtttggcggcaggctgcaccatgcccgaagccatgtaccttgccaatactgcggccggggttgtcgtggcgaaactcggtacggcggtttgctcgtttgccgaattgatcaaggcattgtcagggcaatcaacaatgtag

SEQ ID NO: 71023 - DNA, 1404 bp, Neisseria meningitidis; identical to SEQ ID NO: 54458

SEQ ID NO: 71024 - DNA, 591 bp, Neisseria meningitidis
  misc_feature 8, 9, 10, 11, 12: 'n' is a, c, g or t
gtgtgtgnnnnntttaccgaagccatgcaggcagtgtatgacggcaaagaaatcaaaatgaccgaagagcaggctcaggaagtcatgatgaaattccttcaggaacaacaggctaaagccgtagaaaaacacaaggcggacgcgaaggccaataaagaaaaaggcgaagcctttctgaaagaaaatgccgccaaagacggcgtgaagaccactgcttccggcctgcaatacaaaatcaccaaacagggtgaaggcaaacagccgaccaaagacgacatcgttaccgtggaatacgaaggccgcctgattgacggtacggtattcgacagcagcaaagccaacggcggcccggtcaccttccctttgagccaagtgattccgggttggaccgaaggcgtacagcttctgaaagaaggcggcgaagccacgttctacatcccgtccaaccttgcctaccgcgaacagggtgcgggcgacaaaatcggtccgaacgccactttggtatttgatgtgaaactggtcaaaatcggcgcacccgaaaacgcgcccgccaagcagccggctcaagtcgacatcaaaaaagtaaattaa

SEQ ID NO: 71025 - DNA, 948 bp, Neisseria meningitidis
atgaatatcctcagtaaaatcagcagctttatcggaaaaacattttccctctgggccgcgctctttgccgccgccgcttttttcgcgcccgacaccttcaaatgggcggggccttatattccttggctgttgggcattattatgttcggtatgggtttgacgctcaaaccttccgacttcgatattttgttcaaacatcccaaagccgtcatcatcggcgtaatcgcacaattcgccattatgccggcaaccgcctggctgctgtccaaactgttgaacctgcctgccgaaatcgcggtcggcgtgattttggtcggctgctgcccgggcggtacggcttccaatgtgatgacctatctggcgcgcggcaatgtggctttgtcggttgccgttacgtctgtttccaccctgatttccccattgctgactcccgccatcttcctgatgcttgccggcgaaatgctggaaatccaagcggccggtatgttgatgtccatcgtcaaaatggttttgctccccattgttttgggtttgattgtccataaggttttgggcagtaaaaccgaaaagctgaccgatgcgctgccgctggtttccgttgccgccatcgtgctgattatcggcgcggttgttggggcaagcaaaggcaagattatggaaagcggcctgctgatttttgcggttgtcgtactccacaacggcatcggctacctgctcggcttctttgccgccaaatggaccggcctgccttatgatgcacaaaaaacgctggccatcgaagtcggtatgcaaaactcgggcctagccgccgcgcttgccgccgcacactttgccgctgcgccggtcgttgccgttccgggcgcattgttcagcgtgtggcacaatatctccggctcgctgctggcaacttattgggcggccaaagccggtaaacataaaaaaccctaa

SEQ ID NO: 71026 - DNA, 687 bp, Neisseria meningitidis
atgtttgatttcggtttgggcgagctggtttttgtcggcattatcgccctgattgtcctcggccccgaacgcctgcccgaggccgcccgcaccgccggacggctcatcggcaggctgcaacgctttgtcggcagcgtcaaacaggaatttgacacgcaaatcgaactggaagaactaaggaaggcaaagcaggaatttgaagctgccgctgctcaggttcgagacagcctcaaagaaaccggtacggatatggagggtaatctgcacgacatttccgacggtctgaagccttgggaaaaactgcccgaacagcgcacgcctgctgatttcggtgtcgatgaaaacggcaatccctttcccgatgcggcaaacaccctattagacggcatttccgacgttatgccgtccgaacgttcctacgcttccgccgaaacccttggggacagcgggcaaaccggcagtacagccgaacccgcggaaaccgaccaagaccgcgcatggcgggaatacctgactgcttctgccgccgcacccgtcgtacagaccgtcgaagtcagctatatcgatactgctgttgaaacgcctgttccgcacaccacttccctgcgcaaacaggcaataagccgcaaacgcggtttgcgtccgaaacaccgcgccaaacctaaattgcgcgtccgtaaatcataa

SEQ ID NO: 71027 - DNA, 228 bp, Neisseria meningitidis; identical to SEQ ID NO: 36999

SEQ ID NO: 71028 - DNA, 1422 bp, Neisseria meningitidis; identical to SEQ ID NO: 48786

SEQ ID NO: 71029 - DNA, 762 bp, Neisseria meningitidis; identical to SEQ ID NO: 51423

SEQ ID NO: 71030 - DNA, 912 bp, Neisseria meningitidis
atggacaccctgttcagcctcaaggttttccgccaagtcgtccaaagcggcggcttcacccgcgccgccgacgcgctcggcatctccaccgcaatggcaagcaaacacgtcagccacttggaaaacaccgtccaagccaaactcctgcaccgcaacagccgcaacctcagcctgaccgaagccggggaagaatactaccggcaatgcagttacgcgctcgacacgctcgacgatgccgcgcaaaaagccgccggggggacggaaaaaccgcaggggctgctgcgcgtaacgatgccactgtggtttgccggcagccagatatgcaactggctggcggaataccgcgaacgttatcccgaagtgacattagaactgattttggacaaccgccacgtcgatttgattgccgaaggcgtggatttggcgttgcgcgtttcccaaaccctgtccccgtcgctgattgcgcgcccgctggcggaaatcgaatttgccctgctcgcctcgcccgatttcctgaggcgcaacggcgtaccggaaacgccggaagaagtggcggggctgcccgccgtcctgccgacctacaccaaccagcagaaactcgacctcacccgcaaatcggacggcaaaaaataccggcttgaactgacccccgtcatccgtaccgacaacacgctgatgatgcgcgaaatgattaaggcgggcgcgtgcatcggttatcagccgctttgggctgcggaacacgatttgcgctgcggcacgctggtgaggctgctgcccggatacgccgtcccgaccgaccggctgaacgccgtttatgcggacagggcattcttaagcgcgaaagtccgcagcttcatcgattttctgaacgaaaaaatcgccagcaggaaaggctgccgaaatgccgtctga

SEQ ID NO: 71031 - DNA, 3834 bp, Neisseria meningitidis
atgaccacgactactgcccctcagcgtattcgagaaattccctataactatacttcttataccgaccgcgaaatcgtcatccgcctgctgggcgacgaagcgtggcagattctgcaagacttgcgcggacagcgtaaaaccggacgttcggcacggatgctgtttgaagtgttgggcgatatttgggtagttgtgcgcaatccatatctggtcgatgacttgttggagcacccgaaacgccgcgccgcgctggtgcgggaaatgcgccaccgtttgaacgaaatccgcaaacgccgcgacgataatcggcaagtggatgtattggttgcggcagcggaaaaggcagtcgagcgttttgatagcagttttgatgaaaccagccaaaaacgccatcaaattttggaacgcttaagcaaaattaccaagccgcacaatattatgttcgacgggctggcgcgggtaacgcatgttaccgatgcaaccgactggcgcgtcgaatatccgtttgtcgtcgtcaatcccgacacggaggcggaagtcgcgcctttggtgcgcgccttaattgagttggacttggttattatcccgcgcggcggcggtacgggttataccggcggcgcgattcctttggacgcaatgagcgcggtcatcaatacggaaaagctggacaaacatcgcggcgtggaatttgtcgaactggcgggcttggatggcagacatccgattatccggtgcggcgcgggcgtggttacgcggcgagtggaagaaaccgcgcatcaggcaggtttggtgttcgccgtcgatccgacttctgccgacgcgtcctgcgtgggcggtaatgtagcgatgaacgcgggcggtaaaaaagccgtgctgtgggggacggcgttggacaacctcgcctactggcaaatggtcaaccctcaaggcgaatggctgcgtatcgaacgcgtgcgccacaatttcggcaaaatccacgacgaagaaaccgcaatatttgacgttcacacactggattcagacggcctcaatgtcgtcaaaaccgaacgcttggaaattcccggtcacaaattccgcaaagtcggtttgggcaaagacgttaccgacaaattcttgagcggcctgcccggcgtgcagaaagaaggcacggacggcatcatcaccagcgttgccttcgtgttgcataaaatgccgaaatacacgcgcaccgtgtgtatggagtttttcggcacggttgccaccgccacgccatctattgtcgaaatccgcgactttttgcttgcccatgaaagcgtacggctggcaggtttggaacatttggactggcgttatgtccgcgccgtcggctacgccaccaaagcggcgggcaagggacggccgaaaatggttttgctggcggacgtggtttcagacgacgaagccgccgtagaggcagccgccgaacacatctgcgaacttgcccgcgcccgcgacggcgaaggctttatcgccatatctcccgaagcccgcaaaaccttctggctcgaccgcagccgcaccgccgccatcgccaaacacaccaacgcctttaaaatcaacgaagacgtggtcatcccactcgaaaggctcggcgagtattcagacggcatcgaacgcatcaacattgagctttccattcaaaacaaactcaaactctgtgccgccttggagcaatatctgtccggcaaactccccatcgacaaaatgggaaccgacctgccgaccgccgaactgttgggcgaacgcggcaaacacgccctggcccacgtttccgccgtcaaagcgcgttgggactggttgctcgccaatctcgacacgccgcttgccgactacaaggcccgctacggcgcagccgtccacgccgcgcccgaagccaaagacaatgaaagctgctttaccgcattccgcgatttccgcctgcgcgtgtctgtcaaagcagacgtaatgaagccgctttctgaaatcttcagcggcaaaaccgacaccaaaatcatcgaaggcttgggcaaaatccacgccaaaaccgtgcgcggcagagtctttgtcgccctgcatatgcacgccggcgacggcaatgtccacaccaatatccccgtcaattcagacgatgccgaaatgcttcagacggcataccgttctgtggaacgcattatgaaaatcgcccgttcgcttaacggcgtgatttccggcgaacacggcatcggcattaccaagctcgaatttttaagcgacgaagaaatgcagccgttttgggactacaaaaaccaagtcgatcccaaacacaccttcaaccgccacaaactgatgaaaggctcggacctgcgcaacgcctatacgccgtctttcgagcttttgggcgcggaatcgctgattatggaaaaatcagacctcggcacgattgccgattccgtcaaagactgcctgcgctgcggcaaatgcaaacccgtctgctccacccacgttccgcgtgccaacctgctgtacagcccgcgcaacaaaatcctcggcgtggggctcttgaccgaagcctttttatacgaagaacaaacccgtcgcggcgtttccgtcaaacattttgaagaactggcagacatcggcgaccactgcaccgtgtgccaccgctgcgtcaaaccctgccccgtcaatatcgacttcggcgacgtaaccgtagccgtccgcaactaccttgccgattccggccacaaacgctttgcgccggcagcttcaatgggtatggcattcctaaacgcgaccggcccgaaaaccattaaaaccctacgtgccgcgatgatacaaaccggcttccccgcgcagaatttcgcctacaaaatcggcaaactgctgcccgtcggcacgaaaaagcaaaaagccgaacccaaggcaaccgtcggcaaagccccgattaaagaacaaattatccacttcatcaaccgtccgctgcccaaaaacgtgcctgccaaaacaccgcgctccttattgggcatcgaagacgacaaaagcatccccatcatccgcaatccggcttctccggaagatgccgaagccgtgttttactttcccggctgtggttcggaacgcctgttcagccaaatcggactcgccgtccaagccatgctctggcacgtcggcgtgcaaaccgtcctgccgcccggctatatgtgttgcggctatccgcaggacgccggcggcaataaggcaaaagccgaagaaatgagcaccaacaaccgcgtggctttccaccgtatggcaaacaccctcaactacctcgacatcaaaaccgtcgtcgtcagttgcggtacctgctacgaccagctcgaaaaataccgcttcgaagaaatcttccccggctgccgcatcatcgacatccacgaatacctgctcgaaaaaggcgtgaaactgaacggcgtgaaaggtcagcaatacctctaccacgacccctgccacacgcccatcaaaaccatgaacgccacccaaatggccagcagcctgatggggcagaaagtcgtcttaagcgaccgctgctgcggcgaatccggcatgtttgccgtcaaacgccccgacatcgccacccaagtcaaattccgcaaacaagaggaaattgagaaaaacctcaaagagctgccgcagggcgaacccgtcaaaatgctgacctcctgtccggcgtgtctgcaaggcttgagccgctacgccgacgacaacaatatgcccaccgactacatcgttatcgaaatggcgaaacacatcctcggcgaaaactggctagacgagtttgtgaaaaaagccaataacggcggcgtggaaaaagtattgctgtaa

SEQ ID NO: 71032 - DNA, 450 bp, Neisseria meningitidis
atgacgggatttaatgatgccgccggcgtggcatcctccccctccgacatcaaaggcaaatatgttcagaaagttgaagtcgcaaaaggcgtcattaccgcccaaatggcttcaagcaacgtaaacaatgaaatcaaaggcaaaaaactctccctgtgggccaagcgtcaaaacggttcggtaaaatggttctgcggacagccggttcagcgcgccgccgccaccggcgccaaagccgacgacgtcaccgccgccaccgacaacaacggaatcaacaccaagcacctgccgtcaacctgccgcgatgcggcatctgccatttgcacaagaacaccacgcgccgatttcaaacattttcaaaaaatcagccgttaccgagtattgcccgaatcacggcacatggccgaaaaacttcgtcattcccgcaaaagcgggaatctagttcgttga

SEQ ID NO: 71033 - DNA, 345 bp, Neisseria meningitidis
atgaacctagaaaattatgaaaacattttaataaaattacttttttatcataacaacttagtaaatgaatattcttattttattgaaaataaaaatttatttaaaatagtatctcgaacgaaaacgagtaagggcttttttttcactatagaaaaaccattaaattttctaagcaaaaaaacttattttgagtttaattttaaatatttacactcagggaaagaacgctttggttcgtttatgtgctggataaatactaatttaatggaatttgagggggttttttttaacgacctgctacctgataatatgataataaataacttttttgaaataaatgattaa

SEQ ID NO: 71034 - DNA, 2136 bp, Neisseria meningitidis
ttgggcgcaagtgcgtccataagcggcaaaacactgggacagggcgcaaaaaataaacctcaaaacaaacacctgacaagcgtagccgataaaaacggcgcaagttcatcagtgggttatggcagcgaccaagacagtcaaagcagcatcacgaaaagcggcatcaacacccgcaacatacacatcaccgacgaagcgggacaacttgcccgaacaggcaggactgcaaaagaaaccgaagcgcgtatctacaccggcatcgacaccgaaactgcggatcaacactcaggccgtctgaaaaacagcttcaacaaagacgcggtcgccaaagagatcaacctgcaaagggaagtaacgaaggagttcggcagaaacgccgcccaagccgtagcggccgttgccgacaaactcggcaatacccaaagttacgaacggtatcaggaagcccgaaccctgctggaggccgaactgcaaaacacggacagcgaagccgaaaaagccgccatccgcgcatccctcggccaagtaaacgcctatcttgccgaaaaccaaagccgctacgacacctggaaagaaggcggcataggcaggagcatactgcacggggcggcaggcggactgacgaccggaagcctcggcggcatactggccggcagcggcacttcccttgctgcaccgtatttggacaaagcggcggaaaacctcggtacggcgggcaaagcggcggtcaacgcactgggcggggcggcaatcggctatgcggcgggcgggaatgtcggcacggcggcagtaggggcgaatgtcgattggaacaataggcagctgcacaacagcgagatcagaaaaattaaaaataatgccgctaaatttgccaaactccatcccggcatttcccaacggcaggcagaagagcggctggtggcacaagctatgcgtcaggtcgatgcggcttattatgccaaacatgccgacaccgacacggcggcggaacaattcctgcgcagcatagcgggaagtttcaaagccgacggggaaacgttcctggattttgccccgatgaagtattacagggacagcggtaaatttgccgaacatacaggctatcgagatctaagagcaaagttgggacagaatccggtccataccgaagcgcaaaggaacagaactattgaagaaaagacctacggcacaataggcagaggtgtaggtaaaggcatcggcaataccctagccaacaacctgcaggcgggtccgccacactatgtactcggcattacgaactattcgaactggggcaaagaacttattccatacgagaaccctgttgagcgcgccatcggcaaacaggcagaggatatgacggaaaaagcggtagcagctgtgtctttgggccggagtttgccgtcaaaggttgttaatgtaccctctaaattagctaaaagcattaagacagcggaaacacataaaccactggtacaaaagcgtacggaaacttattttagagttgaaggaggaggaagtggaaataatcaggcagccaaagccgctaaaaatacggaaaaaatgaaagccgcaatagatcaaacccacagtggagttgacctgccttatgattcgagacaaattcgagctaaactggaaaaaagatatggagctgagaatattgtatccactacgattccaaagaaaccggtccaaagtatcaataatcaaactaaaccggactactcatctattgtatatactaataaaagtggaaaggtagttaatgttaaatataaagatcctatatcaggggaaagtaaggctgttaatatcgcctatgataataggggattacctatatttgataacgtatcaaattttaccaccaaaatagataattcattgtcgtatacgggacagatgagggcagctactaaagatttatggaaagctattgaaagtggacaagtgcccaaaaatcaatttactaatgaacaactaacgaagattaaagcaggaaatgaaaaaattcctggttatacatggcatcataatgcgcaaagctctcctaataatatgcagttaattcctaatagtattcatacagctgttaggcatactggtcaaaaatcgttaaagaaaggtcagtaa

SEQ ID NO: 71035 - DNA, 342 bp, Neisseria meningitidis
atggtagaacgtaaattgaccggtgcccattacggtttgcgcgattgggcgatgcaacgtgcgactgcggttattatgttgatttataccgttgcacttttagtggttctattttccctgcctaaagaatattcggcatggcaggcattttttagtcaaacttgggtaaaagtatttacccaagtgagcttcatcgccgtattcttgcacgcttgggtgggtatccgcgatttgtggatggactatatcaaacccttcggcgtgcgtttgtttttgcaggttgccaccatcgtttggctggtcggctgtctcgtgtattcagttaaagtgatttgggggtaa

SEQ ID NO: 71036 - DNA, 309 bp, Neisseria meningitidis
atggttgaacgttacaaaaccatgattgccgaagcaaacggtaagattcaccgtttggaagattggggtcgccgccaactggcttacccgattaacaaaatccataaagcccattacgttttgatgaacatcgaaaccactcccgaagtggttgaagagttggaaaccgcattccgtttcaatgatgcggtattgcgccatctaaccatcaaaaccaaacacgccgttaccgaagcatcccctatgttgggtggtgaaaaggctaagaacctgctgagcggtgcgtctgaagaagcggctgcccaataa

SEQ ID NO: 71037 - DNA, 441 bp, Neisseria meningitidis; identical to SEQ ID NO: 55334

SEQ ID NO: 71038 - DNA, 384 bp, Neisseria meningitidis
atgttccgtactatgcttggcggaaaaatccaccgcgccaccgttaccgaagccgatttgaactatgtcggcagtattaccgtcgatcaagacctgttagacgcagcaggcatctaccccaacgaaaaagtcgccatcgtcaacaacaacaacggcgaacgttttgaaacctataccatttcaggcaaacgcggcagcggcgtggtctgcctgaacggggcggcggccaggctggtacagaaaggcgatatcgtcatcatcatgtcttacgtccaactctccgaacccgaaatcgccgcacacgaacccaaagtcgtcttggtagacggaaacaacaaaatccgcgacatcatctcctatgagccgccgcacaccgtgctgtaa

SEQ ID NO: 71039 - DNA, 1086 bp, Neisseria meningitidis
  misc_feature 1063, 1064, 1065, 1066, 1067: 'n' is a, c, g or t
atgtcccaacaatacgtctattctatgctgcgcgtgagcaaggttgtgccgccgcagaaaaccatcattaaagatatttccctttctttcttccccggcgcgaaaatcggcctgctcggtttgaacggcgcgggcaagtccaccgtgctgcggattatggcgggtgtggataaggaatttgagggcgaagccgtgccgatgggcggcattaaaatcggctacctgccgcaagagcctgagcttgatcctgaaaaaaccgtgcgcgaggaagtggaaagcggtttgggcgaagtggctgccgcgcagaaacgtttggaagaagtgtatgccgagtacgccaatcctgatgcggattttgacgcgttggcagaagagcagggccgcttggaagcgattattgcggcgggttcgtccacgggcggcggtgcggaacacgaattggaaatcgccgccgacgcgctgcgcctgccggaatgggatgccaaaatcgataatttgtccggcggtgaaaaacgccgcgttgccttgtgcaaactcttgttgagcaaacccgatatgcttttgctggacgagccgaccaaccacttggacgcggaatctgtcgagtggctggagcaatttctcgtgcgcttccccggtacagtcgttgcggtaacacacgaccgctacttcctcgacaacgccgccgaatggattttggaacttgaccgcgggcacggtattccgtggaaaggcaattactcgtcttggctggagcagaaagaaaaacgcttggaaaacgaggcgaaatccgaagctgcgcgcgtgaaagcgatgaagcaggaattggaatgggtgcgccaaaataccaaaggccgccaagccaagtccaaagcgcgtttggcgcgttttgaggaaatgagcaactacgaataccaaaaacgcaatgaaacgcaggaaatctttattcccgttgccgagcgtttgggtaacgaagtgattgaatttgtgaatgtttccaaatcgtttggcgataaagtgctgattgatgatttgagcttcaaagtacctgctggcgcgattnnnnncacacacttaattaattaa

SEQ ID NO: 71040 - DNA, 483 bp, Neisseria meningitidis; identical to SEQ ID NO: 42582

SEQ ID NO: 71041 - DNA, 1155 bp, Neisseria meningitidis; identical to SEQ ID NO: 55553

SEQ ID NO: 71042 - DNA, 774 bp, Neisseria meningitidis
atgagaccatatgctactaccatttatcaactttttattttgtttattgggagtgtttttactatgacctcatgtgaacctgttaatgaacaaaccagtttcaacaatcccgagccaatgacaggatttgaacatacggttacatttgattttcagggcaccaaaatggttatcccttatggctatcttgcacggtatacgcaagacaatgccacaaaatggctttccgacacgcccgggcaggatgcttactccattaatttgatagagattagcgtctattacaaaaaaaccgaccaaggctgggttcttgagccatacaaccagcaaaacaaagcacactttatccaatttctacgcgacggtttggatagcgtggacgatattgttatccgaaaagatgcgtgtagtttaagcacgactatgggagaaagattgcttacttacggggttaaaaaaatgccatctgcctatcctgaatacgaggcttatgaagataaaagacatattcctgaaaatccatattttcatgaattttactatattaaaaaaggagaaaatccagcgattattactcattggaataatcgagtaaaccaggctgaagaagataattatagcactagcgtaggttcctgtattaacggtttcacggtacagtattacccgtttattcgggaaaagcagcagctcacacagcaggagttggtaggttatcaccaacaagtagagcaattggtacagagttttgtaaacaatccaagtaaaaaataa

SEQ ID NO: 71043 - DNA, 429 bp, Neisseria meningitidis
  misc_feature 6, 7, 8, 9, 10: 'n' is a, c, g or t
gtgtgnnnnntcggctatattaaactgcaaattcctgcaggtaaagccaatccatctcctccggttggtcctgctttgggtcagcgcggtttgaatattatggaattttgtaaggcatttaatgctgcaacccaaggtatggagcctggcttaccgattccggttgtgattactgcatttgcagataaatcattcacatttgtgatgaaaaccccgccagcttctatcttgttgaaaaaggctgccggtttgcaaaaaggtagttctaatcctctgaccaacaaagtgggtaaattgacccgtgcccagttggaagaaattgctaaaactaaagatcctgatttgactgctgctgacttggatgcggctgtccgtactatagcaggttctgctcgctcaatgggcttggatgtggagggtgttgtataa

SEQ ID NO: 71044 - DNA, 204 bp, Neisseria meningitidis; identical to SEQ ID NO: 55694

SEQ ID NO: 71045 - DNA, 255 bp, Neisseria meningitidis; identical to SEQ ID NO: 39349

SEQ ID NO: 71046 - DNA, 510 bp, Neisseria meningitidis; identical to SEQ ID NO: 54807

SEQ ID NO: 71047 - DNA, 522 bp, Neisseria meningitidis; identical to SEQ ID NO: 43029

SEQ ID NO: 71048 - DNA, 459 bp, Neisseria meningitidis
atgaatattcaaacccgccttgccgcaaccgccctcgccctattcctttccgcctgcggaaacggcggcgcgcccgcacagcccaaaggtgaaatttccgaaaaccgcaccgccgcgttcaaatctatgatgcccgacttctcgcgtatgggcaaaatggtcaaaggcgaagagccttacgatgtcgaaaaattcaaacaggcggcggcggcgtttgccgaaagcagcaagaaaccgttcacactttttgagtccgatccgcaaggcaacggccgcgccctgcccgccgtttggtcggatggtgcaaaatttgaagccgaaaaaacaaaattcgccgccgccgtcgaaaaactcaacgccgccgcccaaaccggcaaactggacgaaatcaaagccgcctacggcgaaaccggcgcaagctgcaaatcctgccacgacagtttccgcgcgcccgaataa

SEQ ID NO: 71049 - DNA, 843 bp, Neisseria meningitidis
atgcaaaaccacgttatcagcttagcttccgccgcagaacgcagggcgcacattgccgataccttcggcaggcacgacattccgtttcagtttttcgacgcactgatgccgtctgaagaactgaatcgggtgatggcggaattggtgccgggattggcaaaacagcacctgttgagcgaagtggaaaaagcctgctttatgagccacgccgtattgtggaaacaggcattggatgaaggtctgccctatgttgccgtatttgaggatgatgtcctgcttggcaaagacgcagaaaagttccttgccgaagatacttggttggaagagcgttttgataaggattctgcctttatcgttcgtttggaaacgatgtttgcgaaagttattgtcagaccggataaagtcctgaattatgagaaccggtcatttcctttgctggagagcgaacattgggggacggctggctatatcatttcgcgtgaggcgatgcggtttttcttggaaaggtttgccgttttgccggcagagtggattaaagcggtagattggatgatgtttacttatttctttgataaggaggggatgcctgtttatcaggttaatcccgccttatgtacccaagaattgcattatgccaagttcctcagtaaaaacagtatgttgggtagcgatttggaaaaagatagggaacaagaaagaagacaccgccgttcgttgaaggtgatgtttgacttgaagcgtgctttgggtaaattcggtagggaaaagaagaaaagaatggagcgtcaaaggcaggcggagcttgagaaagcttacggcaggcgggtcatatcgttcaaatag

SEQ ID NO: 71050 - DNA, 2751 bp, Neisseria meningitidis
atgctgacaaacattgccaagaaaatcttcggcagccgcaacgaccgcttgctgaaacaataccgtaaatccgttgccagaatcaacgcgctcgaagaacagatgcaagccctaagcgatgctgatctgcaagccaaaactgccgaattcaaacaacgcctcgccgacggtcagactttggacggcattttgcccgaagccttcgccgtctgccgcgaagcgtcccgccgcaccctcggtatgcgccacttcgacgtgcagcttatcggcggtatggtgctgcacgacggcaaaatcgccgaaatgcgtaccggcgaaggcaaaaccctggtcgccaccctcgccgtctatctcaacgcgctggccggcaaaggcgtacacgtcgttaccgtcaacgactacctcgcctcacgcgatgcgggcattatggagccgctctacaatttcctcggccttaccgtgggcgtgattatttcagatatgcagccgttcgaccgtcaaaacgcctatgccgccgatatcacctacggcaccaataatgaattcggcttcgactacctgcgcgacaatatggttaccgaccaatacgacaaagtgcagcgcgaattgaattttgccgttgtcgatgaagtggattccatcttgattgacgaagcgcgcactccgctgattatctccggtcaggcggatgacaacatccagttgtaccaaatcatgaacaccgttccgccccacctcgtccgtcaagagacagaagaaggcgaaggcgactattgggtcgacgaaaaggcacatcaggtcatcctgagcgaagcaggtcacgaacacgccgagcaaatcctgacccaaatgggattgctggcagaaaacgactccctctattccgccgccaatatcgccctgatgcaccaccttatggcggcattgcgcgcgcattccctcttccacaaagaccaacattacgtcatccaagacggcgaaatcgtcatcgtggacgaattcaccggccggctgatgtccggccgccgctggtcggagggtctgcatcaagccgtcgaagccaaagaaggcgtggaaatcaaacgcgaaaaccaaacccttgcctccatcaccttccaaaactatttccgcctgtacaccaagctctccggcatgaccggcacagccgataccgaagctttcgagttccaaagcatctacaacctcgaaaccgtcatcatcccgaccaaccgccctgtacagcgcaaagacttcaacgaccaaattttccgttccgccgaagaaaaattcgaagccgtcgtcaaagacatcgaagaatgccacaaacgcgggcagcccgtcctcgtcggcaccaccagcatcgaaaactccgaactggtctcccaccttctgcaaaaagccggactgccgcacaacgtcctcaacgccaaagaacacgaacgcgaagccctgattgtcgcccaagccggcaaagtcggcgcgattaccgttgccaccaatatggcgggacgcggtacggacatcgttttaggcggcaacctgaagcaccaaaccgatgccatccgtgccgacgaaaccttgagcgacgaagagaaacaggcacaaatcgccgcactcgaaaacggctggcaggcagaacacgataaagtaatggaagcaggcggcctgcacatcatcggtacggaacgccacgaaagccgccgtatcgacaaccaattgcgcggacgttccggccgtcagggcgaccccggatccagccgtttctacctttcgtttgaagacccgctgctgcgcttattcgcactcgaccgcgccgccgccatcctcaaccgtctcgcccccgaacgcggcgtcgccatcgaacacaacctgctgacgcgccaaatcgaaggggcgcaacgcaaagtcgaaggcagaaacttcgatatgcgcaaacaggttttggaatacgacgacgttgccaacgaacagcgcaaagtcatttacagccagcgcaacgaaattctgaccagcaaagacatcagcgacctgatgcaggaaatccgttctgatgtcgtcagcgacctcgtggatacctatatgccgcccgacagcatggaagaacaatgggacatcccgactttggagaaccgtctggctgccgaattcagactgcacgaagacatccaatcctggctgaaggcggacaatgcgattgacggtcaagacatcaaagaacgcctgatcgaacgcatcgaaaacgaatatgccgccaaaaccgaactggtcggcaagcaggcaatggccgatttcgagcgcaacgtgatgttgcaggtcatcgacaaccaatggcgcgaacacctcgccgctatggactacctgcgacaaggcatacacctgcgcagctatgcccaaaaaaatccgaagcaggaatataaacgtgaagcctttaccatgttccaagacctgtggaacggcatcaaattccatattgcctccctgcttacctcggttcaaatcgaacaaaaccctgtcgcggtggttgaagagcaacccatcggcaacatccagtccatccattccgaatcgcccgatatggaagaacttttgggtcagtcgcaaaccgatctggttaccgaagcctttaatcccgatgggacagatttcagccccgaagccttggaagcgcgggggcaaatcgtccaccgcaacgacccctgcccctgcggcagcggtttgaaatacaaacaatgccacggcaaactggcttaa

SEQ ID NO: 71051 - DNA, 462 bp, Neisseria meningitidis
atggtggaacgcggcggcggctatgtgatgaatttgggttcgattgcaggcaattatgcttatgccggcagcaacgtttacggggcgaccaaggcgtttgtgcggcagttcagcctgaatttgcgcgcggagttggcggataagaacatccgcgttaccaatatcgagccgggtttgtgcggcaatacggagttttccaatgtgcgcttcaaaggcgatgacgagagggcggcgggcgtgtatgagggtgtggaatttatccgccccgaagatattgcggaaaccgcattgtggctgtaccagcggccggcgcatatgaatgtgaacacgattgaaattatgcccgtggcgcagacttttgcaggaatgaaagtgataaaaaaagccgtgcccgaagtgcgggaagactttgaaaaacagagtatgtcgctgttttcccgcatcaggtcctggttcaaatga

SEQ ID NO: 71052 - DNA, 1494 bp, Neisseria meningitidis; identical to SEQ ID NO: 46145

SEQ ID NO: 71053 - DNA, 450 bp, Neisseria meningitidis; identical to SEQ ID NO: 55218

SEQ ID NO: 71054 - DNA, 3987 bp, Neisseria meningitidis; identical to SEQ ID NO: 37428

SEQ ID NO: 71055 - DNA, 1179 bp, Neisseria meningitidis
atggcaaaaatgatgaaatgggcggctgttgcggcggtcgcggcggcagcggtttggggcggatggtcttatctgaagcccgagccgcaggctgcttatattacggaaacggtcaggcgcggcgacatcagccggacggtttctgcaacaggggagatttcgccgtccaacctggtatcggtcggcgcgcaggcatcggggcagattaagaaactttatgtcaaactcgggcaacaggttaaaaagggcgatttgattgcggaaatcaattcgacctcgcagaccaatacgctcaatacggaaaaatccaagttggaaacgtatcaggcgaagctggtgtcggcacagattgcattgggcagtgcggagaagaaatataagcgtcaggcggcgttatggaaggaaaacgcgacttccaaagaggatttggaaagcgcgcaggatgcgtttgccgccgccaaagccaatgttgccgagctgaaggctttaatcagacagagcaaaatttccatcaataccgccgagtcggaattgggctacacgcgcattaccgcaacgatggacggcacggtggtggcgattctcgtggaagaggggcagactgtgaacgcggcgcagtctacgccgacgattgtccaattggcgaatctggatatgatgttgaacaaaatgcagattgccgagggcgatattaccaaggtgaaggcggggcaggatatttcgtttacgattttgtccgaaccggatacgccgattaaggcgaagctcgacagcgtcgaccccgggctgaccacgatgtcgtcgggcggctacaacagcagtacggatacggcttccaatgcggtctactattatgcccgttcgtttgtgccgaattcggacggcaaactcgccacggggatgacgacgcagaatacggttgaaatcgacggcgtgaaaaatgtgctgattattccgtcgctgaccgtgaaaaatcgcggcggcaaggcgtttgtgcgcgtgttgggtgcggacggcaaggcggcggaacgcgaaatccggaccggtatgagagacagtatgaataccgaagtaaaaagcgggttgaaagagggggacaaagtggtcatctccgaaataaccgccgccgagcaacaggaaagcggcgaacgcgccctaggcggcccgccgcgccgataa

SEQ ID NO: 71056 - DNA, 324 bp, Neisseria meningitidis
atgcaaaacgaaaccatcaacctgaaacagcaccttgccgccatcaaagaatactggcagcccgaaatcatcaaccgccacgggttccaattccgcttggtcaaacttttgggcgattacggctggcatacgcacggatacagcgacaaagtgctgtttgccgtggagggcgacatggcggtggacttcgccgacggcggcagcatgacgatacgcgagggcgagatggcggtcgtgccgaagtcggtgtcgcaccgcccgcgttcggaaaacggctgctcgttggtgctgattgagttgtccgacccgtccgaggccgtctga

SEQ ID NO: 71057 - DNA, 600 bp, Neisseria meningitidis; identical to SEQ ID NO: 37200

SEQ ID NO: 71058 - DNA, 1194 bp, Neisseria meningitidis
atgtctaatcaaaaaaaccgcagaaatgccttaatcggcgctgcattcctgatggcgacttccgccatcggcccgggctttctgacccaaaccgccaccttcacccaagcactggcggcaagtttcggctttgtgattctgctctcgattctgctcgacatcggggcgcagctcaatatttggcggattgtcgccgtttccgaaaaacaggcgcaggatattgccaatcaggtcttgcccggcgcaggctatttcttggctgtgctgattgtgatgggcggtttggcgttcaatattggcaacgtcggcggcgcaggcttgggtctgaacctgctgaccggactgtcaccggaaaccggtgccgtgatcagcggcgtgattgccatcggtgtgtttctgtttaaagaagcaggcaaagtgatggacaaattcgcccaagtgatgggtttcgtaatgattgcgctgacggtttatgtggcatggcaggcgaatccgccgctggcagatgccgccgtgcatacctttatgccggaaaaactcgatgcaatggcgattgttacactggtgggcggcacggtcggcggctacatcaccttcgccggtgcgcaccgtctgctggacgcaggcatcaaaggcaaatcggcgttgccggaagtgagccaaagctcggtgcgggcgattctgattgcctcgattatgcggattgtattgtttttggcggttttgggcgtggtcagccaaggcgtacagctcaatcccgacaaccctgcttccacaccgtttgaatatgcggcgggatacatcggcctgctgattttcggcgtggtgatttgggcggcttcgattacttcggtgattggtgcggcttatacttcggtgtcgttcttctccggtctcagcccgtctatcgaacgcaataaaaacaaatggattattgcctttatcgccgtgtccaccgccgtattttccaccatcggcaaaccggcgcaggtgctggtgttcgtaggcgcattaaacggcctgattttaccgatttccctcggtctgattctgattgccgcctacaaaaccaaaattgtcggcgactacaaacacccgctgtggctcaccgtttccggcgtgattgtggtcggtttgatggcagtactcagcgccattaccatcagcaaatatatcggcggcttgttcggctga

SEQ ID NO: 71059 - DNA, 1446 bp, Neisseria meningitidis; identical to SEQ ID NO: 54468

SEQ ID NO: 71060 - DNA, 1311 bp, Neisseria meningitidis; identical to SEQ ID NO: 55587

SEQ ID NO: 71061 - DNA, 1839 bp, Neisseria meningitidis
atgttacccgcccgtttcaccattttatctgtgctcgcggcagccctgcttgccgggcaggcgtatgccgccggcgcggcggatgcgaagccgccgaaggaagtcggaaaggttttcagaaagcagcagcgttacagcgaggaagaaatcaaaaacgaacgcgcacggcttgcggcagtgggcgagcgggttaatcagatatttacgttgctgggaggggaaaccgccttgcaaaaggggcaggcgggaacggctctggcaacctatatgctgatgttggaacgcacaaaatcccccgaagtcgccgaacgcgccttggaaatggccgtgtcgctgaacgcgtttgaacaggcggaaatgatttatcagaaatggcggcagattgagcctataccgggtaaggcgcaaaaacgggcggggtggctgcggaacgtgctgagggaaagaggaaatcagcatctggacggactggaagaagtgctggctcaggcggacgaaggacagaaccgcagggtgtttttattgttggcacaagccgccgtgcaacaggacgggttggcgcaaaaagcatcgaaagcggttcgccgcgcggcgttgaaatatgaacatctgcccgaagcggcggttgccgatgtggtgttcagcgtacagggacgcgaaaaggaaaaggcaatcggagctttgcagcgtttggcgaagctcgatacggaaatattgccccccactttaatgacgttgcgtctgactgcacgcaaatatcccgaaatactcgacggctttttcgagcagacagacacccaaaacctttcggccgtctggcaggaaatggaaattatgaatctggtttccctgcacaggctggatgatgcctatgcgcgtttgaacgtgctgttggaacgcaatccgaatgcagacctgtatattcaggcagcgatattggcggcaaaccgaaaagaaggtgcttccgttatcgacggctacgccgaaaaggcatacggcagggggacggaggaacagcggagcagggcggcgctaacggcggcgatgatgtatgccgaccgcagggattacgccaaagtcaggcagtggttgaaaaaagtgtccgcgccggaatacctgttcgacaaaggtgtgctggcggctgcggcggctgtcgagttggacggcggcagggcggctttgcggcagatcggcagggtgcggaaacttcccgaacagcaggggcgatattttacggcagacaatttgtccaaaatacagatgctcgccctgtcgaagctgcccgacaaacgggaggctttgagggggttggacaagattatcgaaaaaccgcctgccggcagtaatacagagttacaggcagaggcattggtacagcggtcagttgtttacgatcggcttggcaagcggaaaaaaatgatttcagatcttgaaagggcgttcaggcttgcacccgataacgctcagattatgaataatctgggctacagcctgctttccgattccaaacgtttggacgaaggcttcgccctgcttcagacggcataccaaatcaacccggacgataccgctgtcaacgacagcataggctgggcgtattacctgaaaggcgacgcggaaagcgcgctgccgtatctgcggtattcgtttgaaaacgatcccgagcccgaagttgccgcccatctgggcgaagtgttgtgggcattgggcgaacgcgatcaggcggttgacgtatggacgcaggcggcacaccttacgggagacaagaaaatatggcgggaaacgctcaaacgtcacggcatcgcattgccccaaccttcccgcaaaccccggaaataa

SEQ ID NO: 71062 - DNA, 375 bp, Neisseria meningitidis
atgatagtccttcacggcatcccaaattgcgatacggtcaaaaaagccaaaaacaggcttgccgaatatggtatggaatttgaatttcgggattttaaaaaacaggtgccttccgaagcggaaatctgctcgtggctggaacaagtgcctttggcaaccctgctcaacaaacgcgggacaagctggcgcaaactcgatgccgaaacacagcaaaaagtgctgtcctcgacggcggaggccgtcaaactgatgtccgaaatgccgagcctgatcaagcgtcccgtattggagtgcggcggcaaggtttacgccggcttcagcgaagaaacctacgacggcatcttcaatcggcaagccctgtgcagacagggataa

SEQ ID NO: 71063 - DNA, 381 bp, Neisseria meningitidis; identical to SEQ ID NO: 46227

SEQ ID NO: 71064 - DNA, 1635 bp, Neisseria meningitidis; identical to SEQ ID NO: 55206

SEQ ID NO: 71065 - DNA, 228 bp, Neisseria meningitidis
atgaatgtttggtatatatgggacaggatggtggaaatctatcataagtataagaagccgtgcctggttttggcggtggattttgtgatgggtatggtattcatagagccgaatgaggagccgtgcatcggcagatgctatgcgccaatgtcggagtcccctgattttgccaacgttgttgcgatggctgttgctatgatctgtatcgtatggattgccgttttatag

SEQ ID NO: 71066 - DNA, 303 bp, Neisseria meningitidis
atgaccgcgcaacaccaatccgacacgctcttgcgccgcctgaacaccctgccgccaaaacgttacggcgttttcctattgaacgacgattacaccacgatggaatttgtcgtcgaaatcctgaccgaaatctttatgctcggacaagaacaggcggtagcggtgatgctcttggttcatcacgaaggcaaaggcctgtgcggcacttacacgcgcgatattgcccaaaccaaacaacaacaagtcatgcagcgggcaaaagccgaagggcatccgctgcaatgtattgtcgaggagatttaa

SEQ ID NO: 71067 - DNA, 201 bp, Neisseria meningitidis; identical to SEQ ID NO: 43357

SEQ ID NO: 71068 - DNA, 642 bp, Neisseria meningitidis
atgctgaaacccgaaaccatacacatatccggtcctgccggcattttagaaaccatccatatcccgtccgaacaagtaccggcacgcggtgttgccgtcatcaatcatcccaaccccctccagggcggaacaaacaccaacaaagttatccaaactgccgccaaagccttaagcaaactcggcttccactgctacctgcccaaccttcgcggcgtaggcggcagcgaaggcacacacgattacggacgcggcgaaacgcaagactgcctcgccgtcatcgactatgctcgtgcccaacatcccgaagcccccgaatttgccttatccggcttctccttcggcggttatgtcgccacatttgccgcacaagcgcgcatacccgatttattgctgctcatcggcgcggcagtctgccactataccggccgccccgagccgtccgccgttcccaatgttgccaaaacgctgatgatacacggcgcggaagacgaagtcgtcgaaatcgggaaagcactgaaatgggcggaaccgcaagatttgcccgtcattaccatcgccggttccacgcatttctttcacggcaaactcatcgtcctgcgcgacaccatcctccgcttcgcgcccgtatgcctgaacggataa

SEQ ID NO: 71069 - DNA, 786 bp, Neisseria meningitidis
  misc_feature 767, 768, 769, 770, 771: 'n' is a, c, g or t
atgggttttcctgttcgcaagtttgatgccgtgattgtcggcggtggtggtgcaggtttacgcgcagccctccaattatccaaatccggtctgaattgtgccgttttgtctaaagtgttcccgacccgttcgcataccgtagcggcgcagggcggtatttccgcctctctgggtaatgtgcaggaagaccgttgggactggcacatgtacgataccgtgaaaggttccgactggttgggcgaccaagatgcgattgagtttatgtgccgcgccgcgcctgaagccgtaattgagttggaacacatgggtatgccttttgaccgtgtggaaagcggtaaaatttatcagcgtcctttcggcggccatactgccgaacacggtaaacgcgcggtagaacgcgcctgtgcggttgccgaccgtacaggtcatgcgatgctgcatactttgtaccaacaaaacgtccgtgctaatacgcaattctttgtggaatggacggcacaagatttgattcgtgatgaaaacggcgatgtcgtcggcgtaaccgccatggaaatggaaaccggcgaagtttatattttccacgctaaagctgtgatgtttgctaccggcggcggcggccgtatttatgcgtcttctaccaatgcctatatgaataccggcgatggtttgggtatttgcgcgcgtgcaggtatcccgttggaagacatggaattctggcaattccacccgaccggcgtggcaggtgcgggcgtgttgattaccgaagnnnnncacacacttaattaa

SEQ ID NO: 71070 - DNA, 1428 bp, Neisseria meningitidis; identical to SEQ ID NO: 59416

SEQ ID NO: 71071 - DNA, 1077 bp, Neisseria meningitidis; identical to SEQ ID NO: 54444

SEQ ID NO: 71072 - DNA, 1209 bp, Neisseria meningitidis
atgaatgagggtgaagttgttttaacaccagaacaaatccaaaccttgcgtggttatgctttccgtggcgatacctatggcggttggcgttatttggctaatttgggtgaccgttatgcggatgatgctgctgcaattgtcggtaaggatgcaaacttaaatggtttgaatttatggatgaaaaaaggtgtggaaaacctatgggatgatacggtcggtaaaaagacccgtttagagaaatttgatcgggttgcattgcaacatttcagccaatatgtagatctaattaatgaaaataatggtagattacctaacactagtgaaattgagagaagttactataaagccgttaccgaaaatggtgtttcttctagtgcagctattgatttagttattaatcgctcacttccggatatggcagatggttattgggcattaggtttggggatagaagccgaacgtatccacaatgcgcaagcagtaaataatccgaacggtagcgaatgggataatagaaagcagttaatatctgctttagataaaggatttgatggatcttttaaagagaagcattttacttttttacaatctgtgataatggatgtaacaaagttaggtgttgaatatacaatagatggttggcaaaaaattggaggttggggtaatgggataatcaatgatttatataaaagtgttgcaaaaagagagtggactggaatatttgagatcgttaataataacatcaagcaatttagagatctgttcccaaatccggaaggctggatcgatgatggtcaccaatgtttcgctccttgggttaaagaaactaaaaaacgcaatggcaaatatcatgtctacgaccccctcgccctagatttggacggagacggtatagaaaccgttgccaccaaaggctttgcaggcagcttatttgatcacaccaacaacggtatccgcaccgccaccggttgggtttctgccgatgacggtttactcgtccgcgatttgaacggcaacggcatcatcgacaacggtgcggaactcttcggcgacaacaccaaactggcagacggttcttttgccaaacacggctacgcggctttggccgaattggattcaaacggcgacaacatcatcaacgcggcagacgccgcattccaaaccctgcgtgtatggcagatctcaatcagacggcatttcccaagctaa

SEQ ID NO: 71073 - DNA, 798 bp, Neisseria meningitidis
  misc_feature 6, 7, 8, 9, 10: 'n' is a, c, g or t
gtgtgnnnnncggcttttaatgccaaacgcgatgccctcaacgaagccaagctgcaagcccgacttgccgccgaagccctcgacattaccctgcccggacgcgctcaggaaggcggcagcctgcatcccgtaaccctgaccttgcaacgtgtggtcgaactctttcacggaatgggtttcgaagtggcggacgggcctgaaatcgaagacgattttcacaatttccaagccctgaacatccctgcaaaccatcctgcccgtgcgatgcaggatacgttttacgttgaaaacggtgatgttttgcgtacgcacacttccccgattcaaatccgctatatgctcgataaaaaagagccgcccatccgcattatcgcccccggccgcgtttaccgtgtggacagcgatgccacgcactcgcctatgttccatcaggcggaaggtttgtgggtagaagagggcgtaacttttgccgatttgaaagcagtgttcacggattttatccgtcgcttctttgaacgcgatgatttgcaagtacgtttccgcccgtctttcttcccgttcaccgaaccgtctgccgaaatcgacattatgggcgaaaacggcaaatggctggaagtcggcggctgcggcatggtgcatcccaacgtgttgaaaaatgtgaatatcgattctgaaaaatacaccggtttcgctttcggtatcggtctcgaccgtttcgcgatgctgcgttacaacgtgaacgatttgcgcttgttttttgataacgatttgaattttttgaagcagtttgtaaaatga

SEQ ID NO: 71074 - DNA, 936 bp, Neisseria meningitidis
atggggcacaatatgatgaccacccaaaaatggtatgagcatattactaatgtaatcataggcaatactgctaatttcaatagcggttgccctgaagctatagattatgtagatgaaagaaaaggcgttccacttgcagcaatgagacatattttaatgtacactgaagctgcggcttcccatgcctatctatttgaacatgatcttaataaattcaagcaatatgcttatgttgcaggaaagctgggtattttgcggagtgtaaattctacagaccctgaacccttcttctttccctgtgacatgctcaacattcaagatccgatgtttctgatgctgatgagcgacagcccgcagctgcgtgagtttctggtgcgcaatatcgacaacatcgccaacgatacagaagccttcgtaaaccgctacgacctcaaccgtcatatgatttacaatactctgctgatggtggagggtaagcagcttgatcggttgaaacaacgtagcgagaaagtcttggcgcatcccacccctagcaaatggctgcaaaagcggttgtacgattaccgcttcttcctcgctttcgccgaacaggatgccgaggcgatgaaggccgccttagagccgcttttcgataaaaaaaccgcgcgtatggctgccaaagaaacattgtcctatttcgatttctacctgcagccgcaaatcgttacctacgccaaaatcgcatccatgcacggtttcgatttgggcatagatcaagaaatcgcaccgagggatttgattgtttacgatccgctgccggcagacgaatatcaagacatcttcgattttatgaaacagtacgacttgtcttatccgtatgaatatctgcaggattggatagattactatacgttcaaaaccgataagctggtatttggtaacgcgaagcgagagtga

SEQ ID NO: 71075 - DNA, 2037 bp, Neisseria meningitidis
atgactgacaacgcactgctccatttgggcgaagaaccccgttttgatcaaatcaaaaccgaagacatcaaacccgccctgcaaaccgccattgccgaagcgcgcgaacaaatcgccgccatcaaagcccaaacgcacaccggctgggcaaacactgtcgaacccctgaccggcatcaccgaacgcgtcggcaggatttggggcgtggtgtcgcacctcaactccgtcgccgacacgcccgaactgcgcgccgtctataacgaactgatgcccgaaatcaccgtcttcttcaccgaaatcggacaagacatcgagctgtacaaccgcttcaaaaccatcaaaaactcccccgagttcgacaccctctcccccgcgcaaaaaaccaaactcaaccacgatctgcgcgatttcgtcctcagcggcgcggaactgccgcccgaacagcaggcagaactggcaaaactgcaaaccgaaggcgcgcaactttccgccaaattctcccaaaacgtcctagacgcgaccgacgcgttcggcatttactttgacgatgccgcaccgcttgccggcattcccgaagacgcgctcgccatgtttgccgccgccgcgcaaagcgaaagcaaaacaggctacaaaatcggcttgcagattccacactacctcgccgtcatccaatacgccgacaaccgcgaactgcgcgaacaaatctaccgcgcctacgttacccgcgccagcgaactttcagacgacggcaaattcgacaacaccgccaacatcgaccgcacgctcgcaaacgccctgcaaaccgccaaactgctcggcttcaaaaactacgccgaattgtcgctggcaaccaaaatggcggacacgcccgaacaagttttaaacttcctgcacgacctcgcccgccgcgccaaaccctacgccgaaaaagacctcgccgaagtcaaagccttcgcccgcgaaagcctgaacctcgccgatttgcaaccgtgggacttgggctacgccagcgaaaaactgcgcgaagccaaatacgcgttcagcgaaaccgaagtcaaaaaatacttccccgtcggcaaagtattaaacggactgttcgcccaaatcaaaaaactctacggcatcggatttaccgaaaaaaccgtccccgtctggcacaaagacgtgcgctattttgaattgcaacaaaacggcgaaaccataggcggcgtttatatggatttgtacgcacgcgaaggcaaacgcggcggcgcgtggatgaacgactacaaaggtcgccgccgtttttcagacggcacgctgcaactgcccaccgcctacctcgtctgcaacttcgccccgcccgtcggcggcagagaagcgcgtttgagccacgacgaaatcctcatcctcttccacgaaaccggacacgggctgcaccacctgcttacccaagtggacgaactgggcgtgtccggtatcaacggcgtagaatgggacgcggtcgaactgcccagccagtttatggaaaatttcgtttgggaatacaatgtattggcgcaaatgtccacccacgaagaaaccggcgagcccctgccgaaagaactcttcgacaaaatgctcgccgccaaaaacttccaacgcggcatgttcctcgtccggcaaatggagttcgccctctttgatatgatgatttacagcgaagacgacgaaggccgtctgaaaaactggcaacaggttttagacagcgtgcgcaaaaaagtcgccgtcatccagccgcccgaatacaaccgcttcgccttgagcttcggccacatcttcgcaggcggctattccgcaggctattacagctacgcgtgggcggaagtattgagcgcggacgcatacgccgcctttgaagaaagcgacgatgtcgccgccacaggcaaacgcttttggcaggaaatcctcgccgtcggcggatcgcgcagcgcggcagaatccttcaaagccttccgcggacgcgaaccgcgcatagacgcactcttgcgccacagcggtttcgacaacgcggcctga

SEQ ID NO: 71076 - DNA, 765 bp, Neisseria meningitidis
  misc_feature 8, 9, 10, 11, 12: 'n' is a, c, g or t
gtgtgtgnnnnnggcacgggcagtgatttgagtgaggatgatgtgaatagccaagaaatccaacacgtttacggtatttttgacaatgacacaaacacaggtgtggcgaaagacgggcagggcaacgggctgctcgagcaagtgctggaaaaagacaaagacggcaaaacgctgttcttaagtgactacaaaaggtctaacggctcgggcgataagggctgggtagtgaaattggaagccggacagcgcgttaccgtcaaaccgaccgtggtattgcgtaccgcctttgtaaccatccataaatatacgggtaatgacaaatgcggcgcggaaaccgccattttgggcatcaataccgccgacggcggcaagctgaccaagaaaagcgcgcgcccgattgtgccggacgccaatcaggctgtcgcgcaatattccggtcataagaaaggcatcaacggcaaatccatccctataggttgtatgcaaaaaggcaatgaaatcgtctgcccgaacggatatgtttacgacaaaccggttaatgtgcgttatctggatgaaaagaaaacagacggattttcaacaacggcagacggcgatgcgggcggcagcggtatagaccccgccggcaagcgttccggcaaaaacaaccgctgcttctcccaaaaaggggtgcgcaccctgctgatgaacgatttggacagcttggacattaccggcccgacgtgcggtatgaaacgaatcagctggcgtgaaatcttctactga

SEQ ID NO: 71077 - DNA, 1407 bp, Neisseria meningitidis
gtggaatttagcacaaaaaccgaaatcttgcaggaacagcaggcaggcgcacagttatttgtctgcaccgaagaggcgcaattaaaccatccgaccgcccttgcccttttgtcttcgcttgaagaaggtcaaaattttgccgacacaaaaatcccgacaggcaacggtttgcaggctgttgccgtatgctgtctgaaaagcaccggccgcgccgcattgaacaaggccgccgccgaagccgccaaatgggcgcaaaatcaggaaacggtcaatgtggacatccatgccttcgatgaagcgcaagccgccgccgtagccgaagcgtttgcgattgcgttcggcaacgccgcctaccgtttcgaccgctacaaaaaagaagccaagcccgccaaatttgaaaccgccgtgttccacagcgcacacgaagccgtcgttaaagaagccttgcgcgtcgccgaagcgcaagtttacggacaaagcctctgccgcgacttgggcaacgccgcgcccaacgaatgcacgcccgaatttttagcgcgcaccgccaaagccgaagccgaaaaactgggcgcgcacgccaaaatcatcgaaaaagactacatcaaagaaaacatgggttcgttttggtcggtcgccaaaggcagcgcggaagccccctatttggtcgaactgagctatttcggtgcagccgacaaagaagccgcgcctgtggtattggtcggcaaaggcattaccttcgacaccggcggcatctcccttaaacccggtctgaacatggacgaaatgaagtttgatatgtgcggcgcggcaaccgtcatcagcaccttctgcgccgccgtcaaactgcaactgccgatcaacctgattgccatcgtcgccacttgtgaaaatatgccttccggcgcggccaacaaaccgggcgacgtcgtaaaaagcatgaaaggcctgaccatcgaagtgttgaacaccgatgctgaaggccgtctgattttgtgcgacgcgctcacttacgccgaacagttcaaacccaaagccgtcatcgacgtcgccaccctgaccggtgcgtgtattgttgccttggggcacgatgtcagcggcgtgatgggcaacaatcaagatttggtcgacagcctgcttgccgcttcctacaacgtggacgacaaagcgtggcaactgccgctctttgagacctacaaagaccaactcaaatccaactttgccgacattccaaacatcggcacgcccggcgcgggcacgattaccgccgcaacattcctatcctactttaccgaagactatccatgggcacaccttgacatcgcgggtacggcgtggaaatccggtgcggaaaaaggtgcgaccggccgtcccgttcccttgctgctgaactatctgcggaatctttaa

SEQ ID NO: 71078 - DNA, 747 bp, Neisseria meningitidis; identical to SEQ ID NO: 47877

SEQ ID NO: 71079 - DNA, 1680 bp, Neisseria meningitidis
atggaaattattaacgatgcagaacttatccgttccatgcagcgtcagcagcacatagatgctgaattgttaactgatgcaaatgtccgtttcgagcaaccattggagaagaacaattatgtcctgagtgaagatgaaacaccgtgtactcgggtaaattacattagtttagatgataagacggtgcgcaaattttcttttcttccttctgtgctcatgaaagaaacagcttttaaaactgggatgtgtttaggttccaataatttgagcaggctacaaaaagccgcgcaacagatactgatcgtgcgtggctacctcacttcccaagctattatccaaccacagaatatggattcgggaattctgaaattacgggtatcagcaggcgaaataggggatatccgctatgaagaaaaacgggatgggaagtctgccgaaggcagtattagtgcattcaataacaaatttcccttatataggaacaaaattctcaatcttcgcgatgtagagcagggcttggaaaacctgcgtcgtttgtcgagtgttaaaacagatattcagattataccgtccgaagaagaaggcaaaagcgatttacagatcaaatggcagcagaataaacccatacggttcagtatcggtatagatgatgcgggcggcaaaacgaccggcaaatatcaaggaaatgtcgctttatcgttcgataaccctttgggcttaagcgatttgttttatgtttcatatggacgcggtttggcgcacaaaacggacttgactgatgccaccggtacggaaactgcaagcggatccagaagttacagcgtgcattattcggtgcccgtaaaaaaatggctgttttcttttaatcacaatggacatcgttaccacgaagcaaccgaaggctattccgtcaattacgattacaacggcaaacaatatcagagcagcttggccgccgagcgcatgctttggcgtaacagacttcataaaacttcagtcggaatgaaattatggacacgccaaacctataaatacatcgacgatgccgaaatcgaagtgcaacgccgccgctctgcaggctgggaagccgaattgcgccaccgtgcttacctcaaccgttggcagcttgacggcaagttgtcttacaaacgcgggaccggtatgcgccaaagtatgcccgcacctgaagaaaacggcggcggtactattccaggcacatcccgtatgaaaatcataaccgccggattggatgcagcggccccgtttatgttgggcaaacagcagtttttctacgcaaccgccattcaagctcaatggaacaaaacgcctttggttgcccaagacaagttgtctatcggcagccgctacaccgttcgcggatttgatggggagcagagtcttttcggagagcgaggtttctactggcagaatactttaacttggtattttcatccgaaccatcagttctatctcggtgcggactatggccgcgtatctggcgaaagtgcacaatatgtatcgggcaagcagctgatgggtgcagtggtcggcttcagaggagggcataaagtaggcggtatgtttgcttatgatctgtttgccggcaagccgcttcataaacccaaaggctttcagacgaccaacaccgtttacggcttcaacttgaattacagtttctaa

SEQ ID NO: 71080 - DNA, 441 bp, Neisseria meningitidis; identical to SEQ ID NO: 55161

SEQ ID NO: 71081 - DNA, 432 bp, Neisseria meningitidis
atggatatccaaaccatcctcgaaaaaaccctgcccggcctgggctacgaactggtcgatttcgaactgaccgcgcaaggaacattgcgcgtgttcatcgacaaagaaagcggcattaccgtcgaagactgcgcaaccgtcagcaaccacttgagccgcgtcttcatggttgaagacatcgactacaaaaacctggaaatttccagccccggactcgaccgccccttgaaaaaagccgccgacttcgtgcgctttgccggtcagaatgccaaaatcaaaacccgcctgccgatagacggtcaaaaaaactttatcggtaaaatcgaaggctgcgaaaacgacactgttaccgtttccttcgacggcaaaaccgtacaaatcgaattgggcaacatcgacaaagcccgcctgcgccccgaattcaaattctaa

SEQ ID NO: 71082 - DNA, 1578 bp, Neisseria meningitidis
atgagtaaattcttcaaacgcctgttcgacattgccgcctccgcctcgggactgattttcctctcgccagtatttttgattttgatatacctcatccgcaagaatctgggttcgcccgtcttcttctttcaggaacgccccggaaaggacggaaaaccttttaaaatggtcaaattccgttccatgcgcgacgcgcttgattcagacggcattccgctgcccgacagcgagcggctcacgcccttcggcaaaaaactgcgtgccgctagtttggacgaactgcctgaattatggaatgtcttaaaaggcgacatgagcctggtcggcccgcgcccgctgctgatgcaatatctgccgctgtacgacaacttccaaaaccgccgccacgaaatgagaccgggcattaccggctgggcgcaggtcaacgggcgcaacgcgctttcgtgggacgaaaaattcgcctgcgatgtttggtatatcgacaacttcagcttttggctggatatgaaaatcctgtttttgacagtcaaaaaagtcttgatcaaagaaggcatttcggcggaaggggaagccactatgccttatttcactggaaatcaaactaatgaaaaaaataatatactgattctgtcggcaggtcgccgtgtcgaattggtgcaggacttccaaaccgaagccgcacgtttttcagacggcatcagcgtttttgccactgacctcaacccccgcatgtcttctgcctgccatgtttcggacggttcatttgaagtgccgccgattagtgccgattcatatatcgacagcattttcaatctggcggtacgcgaaaatatcggtttaatcatcccaaccatagacaccgaactgcaaaagctggcagacgagcgcgaacgctttgaagcggcaagtgtccacatcgtcgtttccgattcggacttcatcgcacaatgccgcgacaaacggaaaaccgccaccttgtttgcccgctacggcatacgctcacccgaaatttacgaccgcaagaagttggttttcccttgcttcgccaagccttatgacggcagccgcgccatcggtgcaaaacggattgacacacctgccgacctgacaccggaagtcttggcagacaccaaattaatgttctgtcagtttatcgacatcgaaaataaattttccgagtttaccgtcgatatgtattacgaccgtcaatgccgtctgaaatgcgccatcccgcgaaaacgcttggaagtgcgctccggcgaaatcagcaaaggcgttacctgcaaaaacagcctctaccaaacgctgctggaaaaaatgtcggtattgcagggcgcgcgcggctgtatcacggcgcagttcttctacaacgaagaaaccggcgaattctacggcgtggaaatcaacccccgcttcggcggtggcttcccgctgacgtatgccgcaggcggcaattatccgagccggttgatgcgcgaatacctcggcgacgaagaaatcccgttttcagacgactgggaaaacaacctcattatgttgcgctacgatgccaaggtcttggttcatgaaaacgattaa

SEQ ID NO: 71083 - DNA, 849 bp, Neisseria meningitidis
atggacttcaaacaatttgattttttacacctgataagtgcttccggctgggagcatctggctgaaaaggcgtgggcgttcgggctgaaccttgccgccgcgctgcttatttttttggtcggaaaatgggcggcgaaacgcattgtcgccgtgatgagggcggcgatgacgcgcgcgcaggtcgatgccacgctgattagttttttgtgtaatgttgccaatatcggcttattgattttggtgattattgccgcattgggcagattgggcgtttccacaacatccgtaaccgccttaatcggcggcgcgggtttggcggtggcgttgtccttgaaagaccagctgtccaattttgccgccggtgcgctgattatcctgtttcgcccgttcaaagtcggcgattttatccgcgtcggcggttttgaaggatatgtccgagagattaaaatggtgcagacttctttgcggacgaccgacaacgaagaagtcgtgctgcccaacagcgtggtgatgggcaacagcatcgtcaaccgttccacactgccgctgtgccgcgcccaagtgatagtcggcgtcgattacaactgcgatttgaaagtggcgaaagaggcggtgttgaaagccgccgtcgaacaccccttgagcgttcaaaacgaagagcggcaggccgccgcctacatcaccgccttgggcgacaatgccatcgaaatcacattatgggcttgggcaaacgaagcagaccgctggacgctgcaatgcgacttgaacgaacaagtggtcgaaaacctccgcaaagtcaatatcaacatcccgttcccgcaacgcgacatacacatcatcaattcttaa

SEQ ID NO: 71084 - DNA, 1239 bp, Neisseria meningitidis
atggctttttatgcttttaaggcgatgcgtgcggccgcgttggctgccgccgttgcattggtactgtcgtcttgcggtaaaggcggagacgcggcgcagggcgggcagcctgcgggtcgggaagcaccggctcccgtcgtcggtgtcgtaaccgtccatccgcaaaccgttgcgttgaccgtcgagttgccgggacgtttggaatcgctgcgtaccgccgatgtccgcgcccaagtcggcggcatcatccaaaaacgcctgttccaagaaggcagttatgtccgtgccggacagccgctgtatcagatcgacagttccacttatgaagcaggtctggaaagcgcgcgcgcgcaactggcaacggctcaggcaacgcttgccaaagcggatgcggatttggcgcgatacaagcctttggttgccgccgaagccgtcagccggcaggaatacgatgctgcggtaacggcgaaacgttctgccgaggcaggtgtcaaagcagcacaggcggcaatcaaatctgccggcattaatctgaaccgttcgcgcattaccgcgccgatttccggctttatcggtcagtccaaagtttccgaaggtacgctgttgaatgcgggcgatacgaccgtgctggcaaccatccgccaaaccaatccgatgtatgtgaacgttacccagtctgcatccgaagtgatgaaactgcgccgtcagatagccgaaggcaaactgctggcggcggatggtgtgattgcggtcggcatcaaatttgacgacggcacagtttaccctgaaaaaggccgcctgctgtttgccgatccgaccgtcaacgaatcgaccggtcagattaccctgcgcgccgccgtaccgaacgatcagaatatcctgatgcccggcctgtatgtgcgcgtgctgatggaccaagtggcggtggataacgcatttgttgtgccgcagcaggcggtaacgcgcggtgcgaaagataccgtgatgattgtgaatgcccaaggcggtatggaaccccgcgaggtaacggttgcgcaacagcagggtacgaattggattgttacgtcgggtctgaaggacggggacaaggtggttgtggaaggcatcagtatcgccggtataacgggtgcgaaaaaggtaacgcccaaagaatgggcgccgtctgaaaaccaagccgccgcgcctcaatccggcgttcagacggcatctgaagccaaaactgcttctgaagcggaataa

SEQ ID NO: 71085 - DNA, 1104 bp, Neisseria meningitidis
  misc_feature 8, 9, 10, 11, 12: 'n' is a, c, g or t
gtgtgtgnnnnngtgcaacgcgcctgcgaaacggcgaaatccgtattgattattcctgaaaaccacacgcgcaatacgttttacctgcaaaacgtttacgccctcggcgagattttgcgttcggcagggtatgaagtgcgcttgggcagcctgaatccggaagtaaccgaaccgaccgaatttgaaaccgcattgggcgacaaaatcctgttggaacctttattgcgtacccgcgatcgcgtccatcttgcagacggcttttcgccttgcgtggttttgttgaacaacgatttgtccgccggcattcccgacatcctcaaaggcatcagccaaaccgttttgccgccgttgcacggcggttggacgacgcgccgcaaaacaaatcatttcggcgcgtacaaccaagttaccgccgaatttgccaagttaatcggcatcgacgaatggcaaattaacccttattttgaaaaaatcggcggtttggacttccaagggcgtgaaggcgaagacgcgttggcggaagcggtagaacgtgtgctggcgaaaattcaagccaaatacgacgaatcgggcattaccgacaaacctttcgtcatcgtcaaagccgatgccggcacttacggcatgggcgtgatgagcgtcaaatccgccgacgaagtgcgcggattgaaccgtaaaaaccgcaataaaatggcgaaagtcaaagaaggcttggaagtcagcgaagtgattgtccaagaagggatttatacttatgaaaccttaaacggcgcggtgtgcgaacccgtcgtgtatatgatggaccgcttcgtcatcggcggctttttccgcgtacacgaagggcgcggtgcggacgaaaacctcaacgccggcggtatggtgtttgttccgctgtctaacagcattcctaccggtaacggcgataattcccaagaagcgcccgaagcctgcaagcgcgtattcgaacaatgggactcgctgggtatgccgcgctctgaaaaagactgcgacgtggacaacgaacacaaccgcctctacgtttacggcgtaatggcacgcctgtcgcttctggcggcttcaatcgagttggaagaaacggcgtaa

SEQ ID NO: 71086 - DNA, 1386 bp, Neisseria meningitidis
atgtcttcaggactcgtaacagcggcgtatatcgttgccgcaattttatttatcttttcgctggcggggctgtccaagcaggaaaccgccaaacagggctgctattccggtatcgccggtatggcggtcgccctttttgtaactgttttttccgacaatacccacggactgggctggatcatcatcgccatgctcatcggcgcggcaatcggcatctacaaagccaaaaaggtggaaatgaccgaaatgcccgaactgattgccctgctgcacagcttcgtcggcctagcggcggttttggtcggcttcaacagctatatcgcgccgggcaacgtttcgcacgatatgcacaccatccatctggtcgaagtgtatttaggcatcttcatcggcgcggtaacctttaccggctcgctggtcgcattcggcaaactcaacggcaaaatcagcagcagcccgctgcaactgcccgtcaaacacaagctcaacgcactggcacttgccgtatcgtttgtgttgctgctcgtatttgtcggcattgacggcagcggcttcatcctgctgattatgaccctgattgccctcgcattcggctggcacttggttgcctccatcggcggcgcagatatgcccgtggtcgtgtccatgctcaactcctactccggctgggcggccgcagcggcaggcttcatgctctccaacgacctgctcatcgttaccggcgcgctggtcggctcaagcggcgcgattctgtcctacattatgtgcaaagccatgaaccgctcgtttgtctcggtaattgccggtggtttcggcagcgacagcggcacattatcttccggcagccaagagataggggaataccgagaagtcaaagctgccgatattgccgaaatgctgaaaggcgcaaacaatgtcatcattaccccgggctacggtatggcagtcgcacaagcgcaataccccgttgccgaaatcaccgagcttttacgtaaaaacggcaccgaagtacgcttcggcatccaccccgtcgccggccgcctgcccggtcatatgaacgtactgctcgccgaagccaaagtcccctacgacatcgttttggaaatggacgaaatcaacgacgacttccccgaaaccgatgtggtcttggtcatcggtgcgaacgacaccgtcaaccccgccgcccaaaccgacccgaacagcccgattgcgggtatgcccgtgttggaagtgtggaaggcaaaagaagtcgtcgtcttcaaacgctcgatgaataccggctacgcaggtgtacaaaacccactgttcttcaacgaaaacagcgtgatgtgtttcggagatgcgaagaaaaccgtagatgacattctgtccgaactgaaaaaataa

SEQ ID NO: 71087 - DNA, 423 bp, Neisseria meningitidis; identical to SEQ ID NO: 40586

SEQ ID NO: 71088 - DNA, 735 bp, Neisseria meningitidis
atgagcgcaaacgtcagccgccttgttgttcaaaacctgcaaaaaagttttaaaaaacgccaagtcgttaaaagcttctccctcgaaatcgaaagcggcgaagtcatcggactgctcgggcccaacggtgcgggtaaaaccaccagcttctacatgatagtcggactcattgccgccgatgcgggcagcgtgatgctggacgggcaggaattgcgtcacctgcccatacacgaacgcgcccgcctgggtgtcggctacctaccgcaggaagcctctattttccgtaaaatgaccgtcgaacaaaacatccgcgccatcttggaaatcagaaccaaagataaaaatcaaatcgacagggaaatcgaaaaactgcttgccgacctgaatatcgagcgtttgcgcaataatcctgccccatctttgtcaggcggcgaacgccgacgcgtcgaaatcgcccgcgtactcgccatgaaaccgcattttattttgttggacgagccttttgccggcgtcgatcccatcgccgtcatcgacatccagaaaatcatcggatttctcaagtcgcgcggtatcggcgtattgattaccgaccacaacgtacgcgaaaccctcagcatctgcgatcgggcctacattatttcagacggcacggtgttggcatcgggaaaacctgatgatttggtcggaaacgaacaggttcgttctgtttatctgggtgagaacttcaaatattga

SEQ ID NO: 71089 - DNA, 987 bp, Neisseria meningitidis
atgcaataccgaatcagaagagaaaacgaagcacccgaagcaaaaaatgcgggggaaaccttatgggagcgcgatatgatgcgcgaagtgctgctgtccgcctatcgggacaggcgcagggagcggatgtggaaaaacatctggcgcgccgtcagcaccctgattctggttgccctgattgcaggcattttccgaaaagacgaagccgcattgcagttggcgggcaatacgccgcataccgcagtcgtcaacctgtacggcgaaatcggcaacggtgtagaagaccaggtcaaaaaactcaaagacggtatggaggccgcctacaaaaacccgcaggcaaaagccatcgtcatccgcgccaacagccccggcggttcgcccgtcgtctccaacaccgcttttgaagaaatacgccgtctgaaggcgcagcaccccggcattcccgtttatctcgtggcggaagatatgtgcgcgtccggctgctactacatcgcggcggcggcggacaaaatctatgccgacccgtccagcatcgtcggcagcatcggcgttatcggcagcagtttcgacgcgaccggcctgatggaaaaaatcggcgtgaaacgcagggttaaaattgcgggcagcaacaaaggcatgggcgatccgttttcgcccgaaacgcccgaacagtcgaaaatctgggaagaaatgctgaccggcatacacggcgaattcatcaaagccgtcaaaaccggacggggcggccgcctcaaattccgacaatatcccgacgtgttcagcggtcgggtgtacacgggtgcggatgcgctgaaagtcgggctggtggacggactcggcaatatttacagcgtggcgcgagacgtggtcaaagcccccgatgtggtggattacactccgaaggacgatttcggcagaatcttgggcagacgcttcggcgcagaactcaaagcaagcgtgcgcgaagccctgcaggccgtccggtag

SEQ ID NO: 71090 - DNA, 2625 bp, Neisseria meningitidis
atgaaaacctccgaactgcgccaaaaattcctaaaattttttgaaaccaaaggccacaccgtcgtccgctcctccagcctcgtgccgcacgacgacccgaccctgctgtttaccaacgcgggcatgaaccaatttaaagacgtatttttaggtttcgacaaacgcccgtacagccgcgccaccaccgcgcaaaaatgcgtacgcgcaggcggcaaacacaacgacttggaaaacgtcggctacaccgcccgccaccacaccttctttgaaatgatgggcaacttctccttcggcgactatttcaaacgcgacgccatccacttcgcttgggaatttctgacttcccccgaatggctcaacatccctaaagacaaactgttggcgaccgtttacgcggaagacgacgaagcctacaacatctggttgaacgaaatcggtatgccgtccgagcgcatcgtccgcatcggcgacaacaaaggcgcgaaatacgcatccgacaacttctggcaaatgggcgacaccggcccttgcggcccctgctccgaaattttctacgaccacggcgaagaaatctggggcggcattcccggcagtcccgaagaagacggcgaccgctggatcgaaatttggaactgcgtatttatgcagttcaaccgcgacgaacaaggcaatatgaatccgctgcccaagccgtccgtcgataccggcatgggtttggagcgcatggcggcagtaatgcaacacgtccacagcaactacgaaatcgacttgttccaagacctgctcaaagccgttgcccgcgaaaccggcgcagctttcagcatggatgaacccagcctgaaagtcatcgccgaccacatccgctcctgctccttcctgattgcagacggcgtattgccgtccaacgaaggccgcggctacgtattgcgccgcattatccgccgcgccgtgcgccacggttacaaactgggtcaaagcaaaccgttcttccacaaactcgttaccgatttggtcaaagagatgggcgatgcctaccctgaattgaaagaaaaacaggcgcaaatcgaagaagcgttgaaaaacgaagaaagccgttttgcccaaactttggaaaccggtatggctttgttggaaaatgcactggccaaaggcggcaaaacactcgacggcgaaatcatcttcaaactctacgatacttacggtttcccatacgacctgaccgccgacatctgccgtgaacgcaatattgaactggacgaagcaggcttcgagcgcgaaatggaagcccaacgcgcacgcgcacgcgccgcccaaagcttcaaagccaacgcccaactgccttatgacggtcaagacaccgagtttaaaggttatagcgaacgccaaaccgaatccaaagtcctcgccctctacaaagacggcgagcaagtcaacgaattgaacgaaggcgacagcggcgcagtcgttatcgactttaccccgttctatgcagaatccggcggccaagtcggcgacgtcggctatatcttctcaggcgaaaaccgctttgaagtacgcgatacccaaaaaatcaaagcggccgtattcggtcaattcggcgtacaaacttcaggccgtctgaaagtcggcgacagcgttaccgccaaagtggatgacgaaatccgcaatgccaatatgcgcaaccacagcgcaacccacttgatgcacaaagccctgcgcgatgtattgggcgaacacgttgaacaaaaaggctcgttggttaccgccgaatccacccgtttcgacatttcccatcctcaagcggtaactgccgaagaaatcgccgaagtagaacgccgcgtcaacgaagccattttggcgaacgttgccgtcaacgccgccattatgagcatggaagacgcccaaaaaaccggcgcgatgatgcttttcggcgaaaaatacggcgacgaagtacgcgtactgcaaatgggcggtttctctaccgaattgtgcggcggcacacacgtttcacgcaccggcgacatcggtctcttcaaaatcatcagcgaaggcggtattgccgcaggcgtgcgccgtatcgaagccatcaccggcctgaacgcgctcaaatgggcgcaagagcaagaacgcttggttaaagacattattgccgaaaccaaagcccaaaccgaaaaagacgtactggcgaaaatccaagcaggcgcggcacacgccaaagcattggaaaaagaattggcacgcgccaaagccgaactcgccgtccacgcaggcgccaaactcttggacgatgcaaaagacttgggcgcagccaaactcgttgctgcccaaatcgaagccgacgcagccgccctacgcgaaatcgtaaccgacctgaccggaaaatccgacaacgccgtgattcttttggcggcagtaaacgacggcaaagtctccctgtgcgcaggcgtatccaaagccctgaccggaaaagtgaaagcaggcgatctggttaaatttgcagccgaacaagtcggcggcaaaggcggcggcagaccagatttggcgcaagccggcggcacggatgccgacaaattgcccgccgtgttggatagcgtgaaagactgggtcggcgcgaagctggtttga

SEQ ID NO: 71091 - DNA, 123 bp, Neisseria meningitidis; identical to SEQ ID NO: 50914

SEQ ID NO: 71092 - DNA, 984 bp, Neisseria meningitidis; identical to SEQ ID NO: 38332

SEQ ID NO: 71093 - DNA, 1485 bp, Neisseria meningitidis; identical to SEQ ID NO: 55660

SEQ ID NO: 71094 - DNA, 2940 bp, Neisseria meningitidis
atgagcggttttaattacgagaaaaaccagccgcaccaaatgcgggcggtttcggcggttttgggcgtgtttgacggggcaacgcccaaatatcgggcggcagacgaaaatcccaaacttttgtttgctgcaaaacaatacgcagacaatatcctaaaagtgcaaagccaaaacggcataggcggccgattccccgaccgttcggacgaccaaaatatccttgatatttccatggaaacgggcacgggcaaaacctatacctacacacaaaccatgttcgagctgcaccgttggctgggcgtgttcaaatttatcgtggtcgtgccgactttgtccattaaggcgggaacgcggcagtttttgcaaagcaaggctttggcagagcattttgaacaggattttggcggagattatgaaggcgtacgcctgaaaacctatgtggtagaaagcgcgaaaaagaataagggcaaaaagtccaatgcgcccataacgattgagcaatttgtcaaagcggaaaataaaaaggaaattcatgtgctgctgattaacgcgggcatggttaattcgccgtccatgaccgatacgggcgacaaggcattgaaggatttgtttgacaatcccgttgatgcattggccgccgtgcgcccgtttgtgattgtggacgaaccgcataaattcccgacccgggagagcgcgaaaacgtggggcaatatcaaacgcttaaaaccgcaatatattttgcgctacggtgcgacatttaacgatgaatattacaacctgctttaccgtttgacggcagtagacgcatttaacgacgggctggtcaaaggcgtgcgcgtgtttcaggaagaaatgcagggcggcatggatgcggcggtaaaactggtgtcgtcggacggcaaagaagcgaaatttgaattaaacgaaaaggacaaaaagcagacgttcaaactggcaaaaggcgaagatttgtcgaaaatccatcccgctgtttcggatttgaaaatcgacaaaatgaataaaaccgtggtggtgttaagcaacggcttggagttgaaaacgggtgccgtcatcaacccttattcctattcgcaaacggtgcaggacgcgatgatgcagagggcggttgccgaacatttcaagctggaacgcgcgcttttggcagaacgcgcgccacagcccaaaatcaagccgctgacgctgttttttattgacgatatcgcgggctaccgcagcggcaacgagctttcaggcagcctgaaagataaatttgaaagctggatccgtgcggaagcggcacgccgcctgaaaacggaaagcgacccgttttatcgtgattacctgcaaaagacgttggacgatgtatccgcctgccacggcggttatttttccaaagacaatacagacagcgacgatagaatcgagcaggaaatcaatgaaatcctgcacgataaggaaaaactgttgtctttggacaacccgcgccgctttattttttccaaatggacgctgcgtgaaggctgggacaatcccaacattttccagatttgcaaactgcgttccagcggcagcacgacttccaagctgcaagaagttggacgcggcctgcgcctgccggtaaacgagctgatggcgcgggtgcgcgatgtgccgtacaaactgaattattttgtcgatagcagcgaaaaagactttgtgaagcagcttgtcggcgaaatcaacgacaattcttttcaggaagaaatctccaaaaagtttaccgaagagctgaaacaaaaaatattgcaaaaataccccgatatcaaaccgctggtattgttaaaccaactgttttcagacggcatcattgacgacaatgaaaactttgccgaagacggctatgacaaattaaaagccgcctatcccgaagccttccccaaaggtttggacaaaggcaaagtcagcaacgccaaagacgagggcaaagacaccatcatcatgcgcgaaggcaaatatgaagaactcaaagccttgtgggagctgattcaccataaagccgttttgcagtacaaaatcaaggatgaagccgaatttgtcgatttatttaccgcctatttgcgtgaaaacgccgccaaattcccgcaggcaggcatacgcacggcggtaaacgaaacttatatcaacaacgggctcatgctttcccgccgcatagacagtattgaagatgaagattttatccgtttcaacacaatgaattaccgagaatttctggaaaaactggcacaaacggcaaaaatccgcatgcagactttgcatcaggcgttttaccgcgtccgcgacgaactgaacattggcgattttttgaatatgcagaccatcgcccaaatcaaaaacggcttcaaccggtttttgcttcatcattccttccataaattcgaactggattaccggcttgtcggcagcaaaatccatccgaccaaatttaccaataaagacggcaaaccgcgcgcggtgaaaaaagcagatttgggcagatttgaagatacggagcaccggcctgccgccggctatctcttcgacgagattttctacgattcggatatagaacatgaaaatgtcgccaacaaccaaattgaaggcgtaaccgtatttaccaaaataccgagaaactccatcaaaatccctgttgccggcggcggcacgtattcgcccgattttgcctatatcgtgaaaaccaaaagcggcgagatcctgaactttgtgattgaagccaaagggactgacggggcggaagatttgcgaaaaagcgaagagcggaaaatcaaacatgccgaaaagctgtttgccgagatttccaaagaaatcaaggtggtgttcaaaactcagtttgacggcgagaggatagccgaactgatcgggcaaaatatgcccgcaggcgggcattctgaaaacggacactga

SEQ ID NO: 71095 - DNA, 1434 bp, Neisseria meningitidis; identical to SEQ ID NO: 55635

SEQ ID NO: 71096 - DNA, 1449 bp, Neisseria meningitidis
atgaacggcgatattggcgtaatcggtttggcggttatgggacaaaacctgattttgaatatgaacgattgcggatttaaggtggttgcctacaaccgaacaatcggtaaggtggacgaatttttaaacggcgcggctaagggaacggatattgtcggcgcgtattccctgcaagacttggtcgataagctggcaaaaccgagaaaaatcatgatgatggttcgcgcaggttcggtggttgacgactttatcgaacaactgcttccgttgttggaagaaggcgacatcattatcgacggcggcaatgccaattaccccgacacgacacggcggacacattaccttgccgaaaaagggattttgtttgtcggcgcgggcgtatccggcggcgaagaaggcgcgcggcacggcccgtccattatgccgggcggggataagcgcgcttgggaagccgtcaaaccgatttttcaggcgattgccgccaaaacgccgcagggcgaaccgtgttgcgactgggtcggcagggacggcgcggggcattttgtcaaaatggtgcataacggcatcgaatacggcgatatgcagttgatttgcgaagcgtaccagttcatgaaagacggcttggggctgtcttacgacgaaatgcaccgcgtgtttgccgagtggaacaaaaccgagctggattcttatctgattgaaatcacagcggcaattttgggctataaggacgaaggcggcgaaccgctggtcgagaaaatcctcgatacggcagggcaaaaaggcacgggcaaatggacgggcatcaatgctttggatttgggtattccgttgacgctgatttccgaagcggtattcgcccgctgcgtttcgtcgttcaaagaacagcgcgtgcagaccggcaagctgttcgcccgaaccgttacgcccgtcgaaggcggcaaacaagaatgggttgaggcgttgagacaggccctgcttgcatccaaaatcatttcctacgcacaaggctttatgctgatccgcgaagcgggcgaaagctacggctgggatttggactacggcaacactgcgctgctgtggcgcgaggggtgcatcattcgcagcgcattcttaagcaatatccgcgacgcgtatgaaaacaatcccgatttggtgttcttgggtgcggatccgtatttcaaaaatattttggaaaactgcctgccggcgtggcgcaaggtggttgccaaggcggtcgaatgcggcatccctatgccttgcatggcttcggcgattacgttcttggacggctacacgaccgaacgtctgcctgccaacctcttgcaggcacagcgcgactacttcggcgcgcacacgtacgaacgcaccgacaaaccgcgcggcgagtttttccataccaactggacgggcaagggcggagataccgcttcgacaacctacgatatttga

SEQ ID NO: 71097 - DNA, 546 bp, Neisseria meningitidis; identical to SEQ ID NO: 54605

SEQ ID NO: 71098 - DNA, 561 bp, Neisseria meningitidis
atgaaaacagcacaagaactgcgcgccggcaatgtatttatggtcggcaacgatcctatggtcgttcaaaaaaccgaatacatcaaaggcggccgctcttccgccaaagtcagcatgaaactgaaaaacctgctgaccggcgcggcttccgaaaccatttacaaagccgacgacaaattcgacgtggtcatcctgtcccgcaaaaactgtacgtacagctactttgccgatccgatgtacgtctttatggacgaagaattcaaccaatacgaaatcgaagccgacaacatcggcgacgcgttgaaattcatcgttgacggtatggaagaccaatgcgaagttaccttctacgaaggcaaccccatctccgtagaactgcccaccatcatcgtacgcgaagtcgagtacaccgagcctgctgtcaaaggcgacacttccggcaaagtgatgaaaaccgcgcgtctggtcggcggcaccgaaatccaagtgatgtcttacatcgaaaacggcgacaaagtcgaaatcgatacccgcaccggcgaattccgcaaacgcgcctga

SEQ ID NO: 71099 - DNA, 462 bp, Neisseria meningitidis; identical to SEQ ID NO: 39618

SEQ ID NO: 71100 - DNA, 390 bp, Neisseria meningitidis; identical to SEQ ID NO: 38387

SEQ ID NO: 71101 - DNA, 669 bp, Neisseria meningitidis; identical to SEQ ID NO: 55451

SEQ ID NO: 71102 - DNA, 633 bp, Neisseria meningitidis
atgagaaaaaccaaaaccgaagccttgaaaaccaaagaacacctgatgcttgccgccttggaaaccttttaccgcaaagggattgcgcgcacctcgctcaacgaaatcgcccaagccgccggcgtaacgcgcggcgcgctctattggcatttcaaaaataaggaagacttgttcgacgcgctgttccaacgtatctgcgacgacatcgaaaactgcatcgcgcaagatgccgaagatgccgaaggagggtcttgggcggtattccgccacacgctgctgcactttttcgagcggctgcaaagcaacgacatctactacaaattccacaacatcctgtttttaaaatgcgaacacacggaacaaaacgccgccgttatcgccattgcccgcaagcatcaggcaatctggcgcgagaaaattaccgccgttttgaccgaagcggtggaaaatcaggatttggctgacgatttggacaaggaaacggcagttatcttcatcaaatcaaccttggacgggctgatttggcggtggttctcttcctgcgaacgtttcgatttgggcaaaaccgccccgcgcatcatcgggataatgatggacaacttggaaaaccatcccgacctgcgccggaaataa

SEQ ID NO: 71103 - DNA, 927 bp, Neisseria meningitidis
atgagcaccttcttccagcaaaccgcccaagccatgattgctaaacacatcgaccgcttcccactattgaagttggaccaggtgattgattggcagccgatcgaacagtacctgaaccgtcaaaaaacccgttaccttagagaccaccgcggccgtcccgcctacccgctgttgtccatgttcaaagccgtcctgctcggacaatggcacagcctctccgatcccgaactcgaacacagcctcatcacccgcatcgacttcaacctgttttgccgttttgacgaactgagcatccccgattacagcaccttatgccgctaccgcaactggctggcgcaagacgacaccctgtccgaattgctcaaactgattaaccgccaactgaccgaaaaaggtttaaaaatagagaaagcatccgccgctgtcgttgacgccaccattattcagaccgccggcagcaaacagcgtcagaccatagaagtcgatgaagaaggacaagtcagcggccaaaccacaccgagtaaggacagcgatgcccgttggatcaagaaaaacggcctctacaaactcggttacaaacaacatacccgtaccgatgcagaaggctatatcgagaaactgcacattacccccgccaatgcccatgagtgcaaacacctgtcgcctttgctggaaggattgcccaaaggtacgaccgtctatgctgataaaggctatgacagtgcggaaaaccggcaacatctggaagaacatcagttaccggacggcattatgcgcaaagcctgccgcaaccgtccgctgtcggaaacgcaaaccaaacgcaaccggtatttatcgaagacccgttatgtggtcgaacaaagcttcggtacgctgcaccgtaaattccgctacgctcgggcagcctatttcggactgattaagtga

SEQ ID NO: 71104 - DNA, 1188 bp, Neisseria meningitidis; identical to SEQ ID NO: 55791

SEQ ID NO: 71105 - DNA, 336 bp, Neisseria meningitidis
atgatggctgataaggaacaagtagaaaagatgatttattctgaaaataaagattgtgttattgatggtatgctcggtatgaccttcagctcggaggaggatgaaatcccttggatttccgagaaattgacggagttgtcgaagcataaagacttggatattgccagattgtcattaacctgtttcggacatctcgccaggatgcatgaaaatatcggcgattgcgataaagtgattgctttattgcgctcaaaacaaggtaatccggattttcaaggttttgccgaagatgcgttagacgatatttccttctttatatttaaaaagcgtccgtaa

SEQ ID NO: 71106 - DNA, 924 bp, Neisseria meningitidis
atgctgcaaagaactttggcgaaatccatcagcgttaccggagtcggcctgcattccggcgaacgggtcgcactgaccctgcaccccgcgcctgaaaacagcgggatttccttccgccgtaccgatttggacggcgagatgggcgaacaaatcaagctgaccccttatttgatcaacgatacccgcctttcctccaccatcgttaccgacaaaggcgtgcgcgtcggcacaatcgaacacattatgtccgcgctgtccgcctacggtatcgacaacgcgctgattgagctgaacgcgcccgaaatcccgattatggacggctccagcctgccgtttatttaccttttgcaagatgcgggcgtggtcgatcaaaaggcgcaaaagcgttttttgaaaatcctcaagcctgtcgaaatcaaagaagcgggcaaatgggtacgctttacgccgtatgacggctttaaggtaacgctgaccatcgaattcgaccatccggttttcaaccgcagctcgcccacttttgaaattgatttcgccggcaaatcctacatcgacgaaatcgcgcgcgcgcgcactttcggctttatgcacgaagtggaaatgatgcgcgcccacaatctgggtttgggcggcaatttgaacaacgccatcgtgattgacgacacggatgtcctgaatcctgaaggcttgcgctatcccgatgagtttgtgcgccacaaaatccttgatgccatcggtgatttgtatatcgtcggacatccgattgtcggcgcatttgaaggctacaaatcgggacacgccatcaacaacgcactcttgcgcgcggttttggcagacgaaacggcttacgaccgggtggaatttgccgacagcgatgatttgcccgacgcatttcacgagctgaacatcagaacttgtggataa

SEQ ID NO: 71107 - DNA, 579 bp, Neisseria meningitidis
atgaaaacttttgccctgatactggccgacggtcaggcgagccgtatgggaggcgaggacaaggggcttgctcttttggggggtaaggcactgatagatcatgtcatcgacagggtcaggccgcaggtcagccatatcgccatcagcaccaaccggaatttggaagaatatgctcgaagaagtccgcatatttttccggacgcacggcagtggcagcatttcggcccgctttcggcattgtgtaccgcagccaacgatttgcagttggcgactgccgactggcttttggttgtgccgtgcgatatgccgtatctgccgggcgatttggtggcgaggtttgaaaccgtgtcgaaacgcacaccgttgtgcaatgcgtattatgtggaaacgccgataacgatgcactacaacattatgtatatccgcccgcagattctgcaaagcgcgattccctatctgttttcgggtatgaaaacattaagaagctggttgcagcagcaaagggcgcggtcggtcagattcgagtttgacgggcattttgccgacttgaacacgcaaatcgatttgcaggagggataa

SEQ ID NO: 71108 - DNA, 399 bp, Neisseria meningitidis
gtgccgatacacatcatccaattccacggcgacgaagacgacacattctgccgtcagttccaccgcccctatatcaaggccattcgtgttcagacgacatcagacatccgaaacgccgccgaccgcttccccgacgctcaggcactgcttttcgatgcctaccatccttcggaatacggcggcaccggacaccgcttcgactggacgctgctggcggaatattcgggcaaaccgtgggtacttgccggcgggctgacccctgaaaacgtcggcgaagccgtccgcatcaccggagcggaagcggtcgatgtatccggcggcgtggaagcgtctaaaggcaaaaaagacccagccaaagtcgccgcctttatcgcaaccgccaaccgcctatcccgttaa

SEQ ID NO: 71109 - DNA, 1056 bp, Neisseria meningitidis
atgccgtctgaaacacgcctgccgaactttatccgcgtcttgatatttgccctgggtttcatcttcctgaacgcctgttcggaacaaaccgcgcaaaccgttaccctgcaaggcgaaacgatgggcacgacctataccgtcaaatacctttcaaataatcgggacaaactcccctcacctgccgaaatacaaaagcgcatcgatgacgcgcttaaagaagtcaaccggcagatgtccacctatcagcccgactccgaaatcagccggttcaaccaacacacagccggcaagcccctccgcatttcaagcgacttcgcatacgttactgccgaagccgtccgcctaaaccgcctgacacacggcgcgctggacgtaaccgtcggccctttggtcaacctttggggattcggccccgacaaatccgttacccgtgaaccgtcgccggaacaaatcaaacaggcggcatcttatacgggcatagacaaaatcattttgaaacaaggcaaagattacgcttccttgagcaaaacccaccccaaggcctatttggatttatcttcgattgccaaaggcttcggcgttgataaagttgcgggcgaactggaaaaatacggcattcaaaattatctggtcgaaatcggcggcgagttgcacggcaaaggcaaaaacgcgcgcggcgaaccgtggcgcatcggtatcgagcagcccaatatcgtccaaggcggcaatacgcagattatcgtcccgctgaacaaccgttcgcttgccacttccggcgattaccgtattttccacgtcgataaaaacggcaaacgcctctcccatatcatcaacccgaacaacaaacgacccatcagccacaacctcgcctccatcagcgtggtcgcagacagtgcgatgacggcggacggcttgtccacaggattattcgtattgggcgaaaccgaagccttaaagctggcagagcgcgaaaaactcgctgttttcctgattgtcagggataaaggcggctaccgcaccgccatgtcttccgaatttgaaaaactgctccgctaa

SEQ ID NO: 71110 - DNA, 435 bp, Neisseria meningitidis; identical to SEQ ID NO: 61452

SEQ ID NO: 71111 - DNA, 1371 bp, Neisseria meningitidis
atgccgcaaaacactttaaacatcgtcatcctcgccgccggcaaaggcacgcgcatgtattccaaaatgcccaaggttttgcacgaaatcggcggcgaaacaatgctcgggcgcgttatcgacaccgccgccgcgctgaatccgcaaaacatctgcgtcgtcgtcggccacggcaaagagcaagttttggacaccgtcaaacgcgatgtcgtctgggttgaacaaaccgaacagctcggcaccggccacgccgtcaaaaccgccctgccccaccttgccgccgaaggccgcacgctggtgctgtacggcgacgttcctttaattgacgttgaaaccctcgaaaccctgctcgaagccgcaggcaacgaagtcgggctgttgaccgacgtgcccgccgacccgtcaggtttggggcgcatcatccgcgacggcagcggcagcgtaaccgccattgtcgaagaaaaagacgcaagtgccgcccaaaaagccgtgaaagaaaccaacacaggcattctcgtcctgcccaacgccaaactggaaaactggctgaacagcctttccagcaacaatgcccaaggcgaatattatttaaccgacctcatcgccaaagccgttgccgacggtattaaagttcatcccgtccaagtgcgcgcctcccacctcgccgccggcgtgaacaacaaacgccagctcgccgaactcgaacgcatcttccaaaccgaacaggcacaagaattgctcaaagcaggcgtaaccctgcgcgatccggcacgtttcgatttacgaggctgtctgaaacacggacaggatgtcgtaattgatgtgaactgtatctttgaaggcgaagtcgaaatcggcgacaacgtcgaaatcggcgcaaactgcgtcatcaaaaacgccaaaatcggcgcaaacagcaaaatctcccccttctcccacctcgaagactgcgaagtcggcgaaaacaaccgaatcggcccctacgcccgtttgcgtccgcaagcccgcctttcagacgacgtacacgtcggcaacttcgtcgaaatcaaaaacgccgccatcggcaaaggcaccaaagccaaccacctcacctacatcggcgatgccgaagtcggcagcaaaaccaacttcggcgcgggtacgattattgccaactacgacggtgtgcacaaacacaaaaccgtcatcggcgacgaagtgcgcatcggttcaaactgcgtcttggtctcccccgtcaaaatcggcaacaaagtaaccaccggcgcgggcagcacgattacccgcaatgtcgaagacggcaaactcgccctcgcccgctcccgccaaaccatcatcgacggctgggtgcgtcctgaaaaagacaaacaataa

SEQ ID NO: 71112 - DNA, 639 bp, Neisseria meningitidis
atgcaaatcgccattatcgattacggtatgggcaacctgcattccgtattgaaatccgtccggacggcggggcagcttgccggaaaaaataccgaaatctttttaagcggcgaccccgaacgcgtgtcccgcgccgacaaagtcatttttcccgggcagggcgcgatgcccgactgtatggcggcactgacgcgcggcggcctggacgaggcagtcaaagatgccttaaaaaacaaaccctttttcggaatctgcgtcggcgcgcaacttttattcgaccacagtgaagaaggaaacaccgacggcttgggctggttcggcggcaaagtcagacgctttgagcgcgacctccgcgacccgcagggataccgtctgaaagtcccgcatatgggctggaacaccgtgcgccaaacccaaaaccacccgctgtttaaagatattccccaagacacgcgtttttacttcgtccacagctactatttcgcccccgaaaatcccgaaaccatattgggcgaaagcgactacccgtccccgtttgcctgcatcgtcggcaaagacaacgtattcgccacgcaatttcacaccgaaaaaagccacgatgccgggctgacgatgttgaaaaactttttaaactggtaa

SEQ ID NO: 71113 - DNA, 192 bp, Neisseria meningitidis
  misc_feature 177, 178, 179, 180, 181: 'n' is a, c, g or t
gtgtctgattccaagacgaaagaacgcgccacattcggcacgcgccgcgcgtttatgattgccgccatcgggtccgccgtcggcttgggcaatatttggcgtttcccctatattgcttttgaaaacggcggcggcgcgttcatcctgccctatctggtcgcgcttctgacggcgggnnnnncacacacttaa

SEQ ID NO: 71114 - DNA, 690 bp, Neisseria meningitidis; identical to SEQ ID NO: 54630

SEQ ID NO: 71115 - DNA, 591 bp, Neisseria meningitidis; identical to SEQ ID NO: 37807

SEQ ID NO: 71116 - DNA, 504 bp, Neisseria meningitidis
  misc_feature 6, 7, 8, 9, 10: 'n' is a, c, g or t
gtgtgnnnnnacacgcaggcgcggctcgaacagcagcagaaacagattgaagccctgcaacagcagctcgcacagcaggcagacgatacggtttaccaactgactcccgaagcagtcaaagacaccattcctgccgaagcacaggcaaacggcaacaacgggcaacccgttaccggtaaagacgggcagcagtatatttacgaccaatcgacaggaagctggctgctgcaaagcctggtcggcgcggcggcaggcgcgtttatcggcaacgcgctggcaaacaaattcacacgggcaggcaaccaagacagtcccgtcgcccggcgcgcgcgtgcagcctaccatcagtccgcacgccccaatgcgcgcaccagcagggatttgaacacgcgcagcctccgcgcaaaacaacaggcggcgcaggcgcagcgttaccgcccgacaacgcgcccgcccgccaattaccgccgaccggctatgcgcggtttcggcaggaggcggtaa

SEQ ID NO: 71117 - DNA, 1005 bp, Neisseria meningitidis; identical to SEQ ID NO: 36487

SEQ ID NO: 71118 - DNA, 333 bp, Neisseria meningitidis; identical to SEQ ID NO: 44638

SEQ ID NO: 71119 - DNA, 1017 bp, Neisseria meningitidis
atgtatcggaaactcattgcgctgccgtttgccctgctgcttgccgcttgcggcagggaagaaccgcccaaggcattggaatgcgccaaccccgccgtgttgcaaggcatacgcggcagtattcaggaaacgctcacgcaggaagcgcgttctttcgcgcgcgaagacggcaggcagtttgtcgatgccgacaaaattatcgccgccgcctacggtttggcgttttctttggaacacgcttcggaaacgcaggaaggcgggcgcacgttctgtatcgccgatttgaacattaccgtgccgtctgaaacgcttgccgatgccaaggcaaacagccccctgctgtacggggaaaccgctttgtcggatattgtgcggcagaagacgggcggcaatgtcgagtttaaagacggcgtattgacggcagccgtccgcttcctgcccgtcaaagacggtcagacggcatttgtcgacaacacggtcggtatggcggcgcaaacgctgtctgtcgcgttgctgccttacggcgtgaagagcatcgtgatgatagacggcaaggcggtgaaaaaagaagacgcggtcaggattttgagcggaaaagcccgtgaagaagaaccgtccaaacccacgcccgaagacattttggaacacaatgccgccggcggcgatgcgggcgtaccccaagccgcagaaggcgcgcccgaaccggaaatcctgcatcctgacgacggcgagcgtgccgataccgttaccgtatcacggggcgaagtggaagaggcgcgcgtacaaaaccagcgtgcggaatccgaaattaccaaactttggggaggactcgataccgacgtgcaaaaagagttggtcggcgaacaacgcaagtgggcgcaggaaaaaatcagcaactgccgacaagccgccgcgcaggcagaccggcaggaatacgccgaatacctcaagctgcaatgcgacacgcggatgacgcgcgaacggatacagtatcttcgcggctattccatcgattag

SEQ ID NO: 71120 - DNA, 999 bp, Neisseria meningitidis
ttgcagcctttagtcagcgtattgatttgcgcctacaacgtagaaaaatatttcgcccaatcattagccgccgtcgtgaatcaaacttggtgcaacttggatattttgattgtcgatgacggctcgacagacggtacgcttgccattgccaaggattttcaaaagcgggacagccgtatcaaaatccttgcacaagctcaaaattccggcctgattccctctttaaacatcgggctggacgaattggcaaagtcgggggggggggaatatattgcacgcaccgatgccgacgatattgccgcccccgactggattgagaaaatcgtgggcgagatggaaaaagaccgcagcatcatcgcgatgggcgcgtggctggaagtgttgtcggaagaaaaggacggcaaccggctggcgcggcatcacaggcacggcaaaatttggaaaaagccgacccggcacgaagatattgccgactttttccctttcggcaaccccatacacaacaacacgatgattatgcggcgcagcgtcattgacggcggtttgcgttacaacaccgagcgggattgggcggaagattaccaattttggtacgatgtcagtaaattgggcaggctggcttattatcccgaagccttggtcaaataccgccttcacgccaatcaggtttcatccaaatacagcgtccgccaacacgaaatcgcgcagggcatccaaaaaaccgccagaaacgattttttgcagtctatgggttttaaaacccggttcgacagccttgaataccgccaaataaaagcagtagcgtatgaattgctggagaaacatttgccggaagaagattttgaacgcgcccgccggtttttgtaccaatgcttcaaacggacggacacgctgcccgccggcgcgtggctggattttgcggcagacggcaggatgcggcggctgtttaccttgaggcaatacttcggcattttgcaccgattgctgaaaaaccgttga

SEQ ID NO: 71121 - DNA, 318 bp, Neisseria meningitidis
ttggcggcgcatattgaaacagttttgcaacgtaagcctgtcgtcatcggcaaacccgaacgcgaaatccgacgggttgcatggtgcagcggcggggcgcaggggttttttcagacggcaatagacgaaggtgtcgatctgtatttgacgggggaaatctctgaagcccaataccaccttgccaatgaaacgggtacggctttcatttcggcagggcatcacgcgacggaacgttacggcgtacgcgcgctggcagaatcggcggcagaggttttcgggttggaagtgtgccattttgacgaaaacaatccggcttga

SEQ ID NO: 71122 - DNA, 291 bp, Neisseria meningitidis; identical to SEQ ID NO: 54579

SEQ ID NO: 71123 - DNA, 234 bp, Neisseria meningitidis; identical to SEQ ID NO: 39424

SEQ ID NO: 71124 - DNA, 579 bp, Neisseria meningitidis; identical to SEQ ID NO: 61948

SEQ ID NO: 71125 - DNA, 261 bp, Neisseria meningitidis
atgcgcaaagcctgccgcaaccgtccgctgacggaaacgcaaaccaaacgtaaccgatatttatcgaagacccgttatagtggattaaatttaaatcaggacaaggcgacgaagccgcagacagtacaaatagtacggcaaggcgaggcaacgccgtactggtttaaatttaatccactatatgtggtcgaacagagcttcggtacgctgcaccgtaaattccgctacgctcgggcagcctatttcggactgattaagtga

SEQ ID NO: 71126 - DNA, 426 bp, Neisseria meningitidis; identical to SEQ ID NO: 60675

SEQ ID NO: 71127 - DNA, 996 bp, Neisseria meningitidis
atgaaaaaatccctgattgccctgactttggcagcccttcctgttgcagcaatggctgacgttaccctgtacggcaccatcaaagccggcgtagaaacttcccgctctgtagagcacaatggaggtcaggtggttagcgttgaaaccggtaccggcatcgttgatttgggttcaaaaatcggcttcaaaggccaagaagacctcggtaacggtctgaaagccatttggcaggttgagcaaaaggcatctatcgccggtactgactccggttggggcaaccgccaatccttcatcggtttgaaaggcggcttcggtaaattgcgcgtcggccgtttgaacagcgtcctgaaagacaccggcgacatcaatccttgggatagcaaaagcgactatttgggtgtaaacaaaattgccgaacccgaagcacgcctcatttccgtacgctacgattctcccgaatttgccggcctcagcggcagcgtacaatacgcgcttaacgacaatgcaggcaaatataacagcgaatcttaccacgccggcttcaactacaaaaacggcggcttcttcgtgcaatatggcggtgcctataaaagacatgtgcgggtggatgagaacgtgaatattgagaaataccagattcaccgtttggtcagcggttacgacaatgatgccctgcacgcttccgtagccgtacagcaacaagatgccaaattggttgaagacaattattcgcacaactctcaaaccgaagttgccgctaccttggcataccgcttcggcaacgtaacgccccgcgtttcttacgcccacggcttcaaaggctcgtttgatgatgcagacttaagcaacgattacgaccaagtggttgtcggtgcggaatacgacttctccaaacgcacttctgccttggtttctgccggttggttgcaagaaggtaaaggcgaaaacaaattcgtatcgactgccggcggtgtcggtctgcgccacaaattctaa

SEQ ID NO: 71128 - DNA, 1923 bp, Neisseria meningitidis
atgattgaaatcaaaaacctcaccctgcaacgcggtttgaaagtcctgctcgacaaagccaacgctaccgtcaatcccggtcagcgcgtcggtttgatcggcaaaaacgggacgggcaaatcgagcctgtttgccttaatcaagggtgaaatcactcaggacggcggcgatgtctcgattccgaaaaactggcggctcgcttccgtttcccaagaaacgcccgatttggatatttccgctttagattacgttttgcagggcgatgccgagttacagacccttcagacggcattgaggcaggcggaagcgcaaaacgacggtatgaaacaggcggaatatcatgccaaattggaagaaatcgacgcttataccgcgccggcccgcgtggcaaaattgttgaacgggctgggtttttcgcaagaagaacacagccgccccgtcaaatccttttccggcggctggcgtatgcgcttgaatcttgcgcaagccctgatttgccgcgccgatttgctgcttttggacgaaccgaccaaccacttggatttggaaaccgtcttgtggctggaaaaccaccttgcctctttaccctgcacgcaaatcatcatttcccacgaccgcgatttcctcaatgcggcaaccacccaaaccatcgaattgtcccagcaaaagctcacgcaatacggcggcaattacgatttttaccaaaacgaacgcgcgcagcgtctcgcgcagcaacaagccgcctatgtcaaacagcaggcgcaaatcaaacatctgcaatcctttatcgaccgcttcaaagccaaagccaccaaagccgttcaggcgcaaagccgcatgaaggctttggcaaagctcgaacgcatcgctcccgcgcatttggacagcgagttttcctttgagttttacaatcccgagcatctgcccaatcctttgctgaagctggaacacgcagatttgggttacgaaggcaaaactgttttgcacgacattaccctgtcgctggaaagcggcgcgcgctatggtttattgggtgtcaacggcagcggtaaatctacatttatcaaagccttggcgggcaaaatcgatttgctctctggcagcatcgtccgttccgaaaaactcaatatcggctattttgcccaacaccaactcgataccatccgcgccgaccaaaaccctgtttggcatattcagcagctttctcccgaagtacgcgaacaagaaatccgaaatttcctcggcggcttcaattttgttggcgatatggcgttacagaaaaccgaacctttttccggcggagaaaaagcccgccttgcccttgccatgattatctggcaaaagccgaacctgttgctgcttgacgaaccgaccaaccatttggacttggatatgcgccacgccttaacgctcgcgttgcaaagtttccaaggcgcattaatcgccgtatcgcacgaccgcagcctgcttgaagcgactaccgacagcttcctcctgatcgacaaaggccgtctgaagaacttcgacggcgatttgaacgattaccgccaatggcgtttggcacaggaaaacgccgccgccgcacccgcagcatccgcacaaagccaaagccgcaaagacaccaagcgcatcgaagcgcaaatccgtcaggaaaaagcccgacgcggcaagccgatacagcagaaaatagaccgtgccgaaaaagaaatcgcacgattgactgatattcagacggcctgtgaagcatttttagcacaagaagacgcttatcttgaagcaaacaaagaaaaattgcaaaataccttatcccagctggcaaaagtcaaaacacaacttgcccaaatcgaagaggtttggctggcttgtcaagaagaattggaacggattgaaactgaaatcgagaaacagtttgccgagcgataa

SEQ ID NO: 71129 - DNA, 378 bp, Neisseria meningitidis; identical to SEQ ID NO: 40737

SEQ ID NO: 71130 - DNA, 210 bp, Neisseria meningitidis; identical to SEQ ID NO: 45301

SEQ ID NO: 71131 - DNA, 246 bp, Neisseria meningitidis
gtggcaggtgcgaccatacggattatcgaccgccaaactgacgaagtgattgccaagaaaaccatctatgtctttgaaaaaggcttggacggcacgggtggggcgagaatgccgtggaagtttgctatcttgtgcaataaagaaagacttacttcttcagagccgttatcggattttgttcttagcgttttaaaaccttatatattgcgtcccttatatattgtgtccctaagaagggacgattaa

SEQ ID NO: 71132 - DNA, 450 bp, Neisseria meningitidis
atgaaaatcggaacaacttggcagacggcatccgctatgctggttttgcgtctgtttgccgcatatgaatttttggaatcgggtttgcaaaaatggaacggggagaattggttttccgaaatcaacgatcagtttccattcccgttcaacttgctgccggacgcgttaaactggaatctcgctatgtatgcggagcttttactgcccgtactgttgcttttgggtttggcaacgcgtctgtcggcattagggctgatggtcgttaccgccgtcgcttgggctgcggttcacgccggttcgggttacaatgtctgcgacaacggttataaaatggctttaatttatatcgtggtattaatcccgctgcttttccagggtgcgggcggatggtcgctggatacgctgctgaaaaaacggttttgcccccaatgccgtctgaagcaagattga

SEQ ID NO: 71133 - DNA, 864 bp, Neisseria meningitidis
atgaaaaccttactgccctttttcggcgtggtgcgcgtcagcggcgaagaccgccaaaccttcctgcacggacagctttccaacgacatcaaccaccttcagaccgggcaggcgtgttatgcgacttacaacacgcccaaaggccgcgtcatcgccaatatgattgtcgtcaaccgaggcggcgatttgctgctgattatggcgcaagacctgcttgaagcaacggtcaaacgtttgcggatgtttgtgttacgcgccaaagccgtttttgaaatccttgaagattacgccgtcggcgcggaattagaagcatccgccgaaccgcttgccgcgcaagaacccagcctcgcctttaccgccgaatgcggttcagacggcatctgttccgtcgtcctgccacatcggggcattttgcacatcgcccccaaaaacgccttgccgccttatgatgccgccgccgaaaacgcgtggcggctgcacgaaatccgtagcggttatccgtggatatgcgcggctaccaaagaaactgccgttgcccaaatgctcaaccagcacatcatcggcggcgtacacttcaaaaaaggctgctatcccggtcaggaaatcattgcccgtgcccagtatcgcggtcaggtcaaacgcggcttggcggtattgtcgggaaattcggcagccgaagcaggcatcctgctggcggcagacggcgaagaggccggcatcgtgctcgacagcgttaaagattcggaaagctttaccgcccttgccgtgattaaattctccgccgcgcaaaaagaactgaccgccccaaacggcagtatcttcaaagcggttcatcccttctttaaaaccgaaaatgcagaataa

SEQ ID NO: 71134 - DNA, 966 bp, Neisseria meningitidis
atgagctacacgcaactgacccaaggcgaacgataccacatccaatacctgtcccgccactgcaccgtcaccgaaatcgccaaacagctgaaccgccacaaaagcaccatcagccgcgaaatcagacggcaccgcacccaagggcagcaatacagcgccgaaaaagcccagcggcaaagccagactatcaaacagcgtaagcgacaaccctataagctcgattcgcagctgattcagcacatcgacacccttatccgccgcaaactcagtcccgaacaagtatgcgcctacctgtgcaaacaccaccagatcacgctccaccacagcaccatttaccgctaccttcgccaagacaaaagcaacggcagcacgttgtggcaacatctcagaatatgcagcaaaccctaccgcaaacgctacggcagcacatggaccagaggcaaagtacccaaccgtgtcggcatagaaaaccgacccgctatcgtcaaccagaaatcccgtatcggcgattgggaagccgacaccattgtcggcaaaggacagaaaagcgcattattgaccttggtcgaacgcgttacccgctacaccatcatctgcaaattggatagcctcaaagccgaagacactgcccgggcagctgttagggcattaaaggcacataaagacagggtgcacaccattaccatggataacggcaaagagttctaccaacacaccaaaataaccaaagcattgaaagcggagacttatttttgtcgcccttaccattcttgggagaaagggctgaatgagaacaccaacggactcatccggcaatacttccccaaacaaaccgatttccgtaacatcagtgatcgggagatacgcagggttcaagatgagttgaaccaccgaccaagaaaaacacttggctacgaaacgccaagtgttttattcttgaatctgttccaaccactaatacactag

SEQ ID NO: 71135 - DNA, 1053 bp, Neisseria meningitidis; identical to SEQ ID NO: 55130

SEQ ID NO: 71136 - DNA, 618 bp, Neisseria meningitidis; identical to SEQ ID NO: 36899

SEQ ID NO: 71137 - DNA, 786 bp, Neisseria meningitidis
atgggttttctgcaaggcaaaaaaattctgattaccggcatgatttccgagcgttccatcgcttacggcatcgccaaagcctgccgcgaacaaggcgcggaactggcgtttacctacgttgtggacaaactggaagagcgcgtccgcaaaatggcggcggaattggattccgaactcgtgttccgttgcgatgtcgccagcgacgacgaaatcaaccaagtgttcgccgacttgggcaagcattgggacggcttggacggtttggtgcattccatcggcttcgcgccgaaagaagccttgagcggcgatttcctcgacagcatcagccgcgaagcgttcaacaccgcacacgaaatttccgcatacagcctgcctgcgctggcaaaagccgcccgtccgatgatgcgcggcagaaactccgccatcgtcgccctgagctacttgggtgcggtgcgcgcgattccgaattacaacgtgatgggtatggcaaaagccagccttgaggcgggcatccgttttaccgccgcctgtctgggcaaagaaggcatccgctgcaacggcatttccgccggtccgatcaaaacactcgccgcctccggcatcgccgatttcggcaaactcttgggacacgtcgccgcccacaatccgctgcgccgcaacgttaccatcgaagaagtcggcaataccgccgccttcctgctgtccgacctgtcgtccggcattaccggcgaaatcacttacgttgacggcggttacagcatcaatgccttgagcaccgagggataa

SEQ ID NO: 71138 - DNA, 1344 bp, Neisseria meningitidis; identical to SEQ ID NO: 55565

SEQ ID NO: 71139 - DNA, 861 bp, Neisseria meningitidis
atggcaaaagtaaaaggcggattggggcgcggtttggattcgctgctcgccaacggcgcagacaacagcagcggcgaccgattgaccacggttgcggttaaagatatccggcccggccgctatcaggcgcgtgttcaaatcgatgacgaagccttgcaggagctggcagattcgattaaggcgcaaggcgtgatacagcccgtcatcgtgcgcgaacacggactgtcccgatacgaactgattgcaggcgaacgccgttggcgtgccgcacagattgccggcctgaccgaaatccccgccgttatcaaaaccatcagcgacgaaaccgcgttggcaatgggtttgatcgaaaacctccagcgcgaaaacctcaaccccatcgaagaagcacaaggcttgaaacgccttgccgacgagttcgggctgacccacgaaaccatcgcccaagccgtcggtaaaagccgaagcgcgatttccaacagcctgcgccttttaagcctgcccgaacccgtgcaggaaatgctttaccaacgccgcctcgaaatggggcacgcccgcgcattgctgaccctgcccgtcgtcgaacagctcgaattggcgcaaaaggccgtcaaaaacggctggtcggtgcgcgaagtcgaacgccgcagccaggtcgcccttcaaaacaaacatcccgagcccaaaaagactgccgccgccgacatcggccgcctgaatgatttgctgactgaaaaactgggtgtcaacgccgaaatcaaaaccgccaaccataaaaaaggcagaatcatcctgcatttcgacacgcccgaaaccttcgaccatatcttgaagcagttgggcatagattaccgaccttaa

SEQ ID NO: 71140 - DNA, 1128 bp, Neisseria meningitidis; identical to SEQ ID NO: 36955

SEQ ID NO: 71141 - DNA, 234 bp, Neisseria meningitidis; identical to SEQ ID NO: 55793

SEQ ID NO: 71142 - DNA, 1410 bp, Neisseria meningitidis
atgaaatacatcagcacgcgcggcgaaaccgcacacaaaccgttcagcgaagttttattgatggggcttgcacccgacggcggcctgatgctgccggaacattatccgcaaatcgggcgggaagccttggacaaatggcgcggtttggcttatcccgaattggcgtttgaaatcatgcgcttgttcgttacggatattccggaggacgatttgcgcgatattctgaaccgtacttacacggaagcggcgttcggtactaaggaaatcacccccgtccgcacgctttcagacggcatcaaaatccaagccttgtccaacggcccgacgctggcgttcaaagatatggcgatgcagtttttgggcaatgcgtttgaatatgttttaaacaaagaaggtaaaaaactcaatatcttgggcgcgaccagcggcgatacgggttcggctgcggaatatgccttgcgcggcaaaaaaggcgtgaacgtatttatgttgtcacccgacggtaagatgagcgcgttccaacgcgcgcaaatgtacagcctgcaagacggaaatatccacaatatcgccgtgaaggggatgtttgacgattgtcaggacattgtgaaggcagtgcaaaacgatgccgcgttcaaggaaaaataccatatcggtacagtcaactcgattaactggggacgcatcgtcgcgcaagtggtttattactttgcgggctatttcaaggcgacgcaaagcaatgacgagcaggtcagcttctgcgtgccgagcggcaacttcggcaacgtttgcgcgggacacatcgccaaacagatgggtttgcctatccgccgcctgattgtcgcgaccaatgaaaacgatgtgttggacgagtttttcaaaaccggtgcataccgcccgcgcaacagcgcgcatacttatgttacctccagcccgtcgatggacatttccaaagcgtccaacttcgagcgtttcgtgttcgacctgatggatcgcgatcctcaggaaatcaatacgctgtgggcggaagtagcggcgggcaaaggctttgacctgcggtttgctttagaaaaagtcggtggcaaatacggttttacctccggcaaatccacccaccccgaccgcctcgccaccatcagacaggtttatgagcaagaccaagaactcatcgacccgcacactgccgacggcgtaaaagtcgcccgcgaagtgcgcgaagaaggggaaacggttgtgtgtttggaaaccgcgttggcagcgaaattcgatgcgaccatacgcgaagccgtcggcgatgccgccattccgcgccccgccgcgctggaaggtttggaaacattgccgcagcgcgtgcaaaccgtgccgaacagtgcggatgcggtaaaaggcatcatcgaacaaacccttgcctga

SEQ ID NO: 71143 - DNA, 765 bp, Neisseria meningitidis
  misc_feature 8, 9, 10, 11, 12: 'n' is a, c, g or t
gtgtgtgnnnnnagcggagcatcttccgcgcctgcacaatcggcagtttccggttctttaatcgagcgcatcaacaataaaggcacggttaccgtcggcacggaaggcacttacgcaccgtttacctaccacgacaaggacggcaaactgaccggttacgatgtggaagtaacccgcgccgtggcggaaaaactgggcgtgaaagtcgagtttaaagaaacgcaatgggattcgatgatggcgggtttgaaggcggggcgtttcgacgtggtggcaaaccaagtcggtctgaccagccccgaacgccaagcgacattcgacaaatccgatccttacagctggagcggtgccgtattggttgcccgtaacgacagcaacatcaaatctatcgacgacatcaaaggcgtgaaaaccgcacaatccctgaccagcaactacggcgaaaaagccaaagctgcaggcgcagatttggtggctgttgacggtttggcgcaatcgctgaccctgattgaacaaaaacgtgccgatgcaaccctgaacgacgaattggcggttttggactatctgaagaaaaacccgaatgcgggcgtgaaaatcgtttggtccgcacctgccgatgaaaaagtcggttccggcctgattgtcaacaagggcaatgacgaagccgtggcgaaattcagtacggcaatcaacgagctgaaagccgacggtacgctgaaaaaactgggcgaacaattcttcggaaaagacatcagtgttcaataa

SEQ ID NO: 71144 - DNA, 303 bp, Neisseria meningitidis; identical to SEQ ID NO: 54163

SEQ ID NO: 71145 - DNA, 360 bp, Neisseria meningitidis; identical to SEQ ID NO: 42498

SEQ ID NO: 71146 - DNA, 1335 bp, Neisseria meningitidis
  misc_feature 8, 9, 10, 11, 12, 1312, 1313, 1314, 1315, 1316: 'n' is a, c, g or t
gtgtgtgnnnnnattgtcgatattcccaaaggcaatctgaaaaccgaaatcgaaaagctggccaaacagcccgaatacgcctacctgaaacagcttcagacggccaagaacgtcgattggaaacaggtgcagctggcctacgacaaatgggactataaacaggaaggcttgaccggagccggtgcagcgattgtggtgattattgtaaccgctctaacttatggatacggagcggctgcagcgggtagcgtaactgccgcaggaagtagtacagccgcagctgcaacaacgacagcggcagcaactaccactgtttctactgcagctgccatgcaaaccgcagctttagcctccttgtatagccaagcagctgtagccatcatcaataataaaggcgatgtaggcaaagcattaaaagatctcggcaccagtgatacggtcaagcagattgttacttccgcactgacggcgggtgcattaaaccagatgggagcagatattgcccaattgaacagcaaggtaagaaccgaactgttcagcagtacgggcaatcaaaccattgccaaccttggaggcagattggccaccaacctcagcaatgcaggtatctcagctggtatcaataccgccgttaacggcggcagcttgaaagacaacttaggcaatgccgcattgggagcattggttaatagcttccaaggggaagccgccagcaaaatcaaaacaaccttcagcgacgattatgttgccaaacagttcgcccacgctttggcgggttgtgttagcggactggtacagggaaaatgtaaagatggggcaattggcgcagcagttggggaaatcgtagctgaatccatacttggcggcagaaaccctgctacactcagcgatgcagaaaagcataaagttatcagttactcgaagattattgcgggcagcgtggcggcactcaacggcggcgatgtgaatactgcggcgaatgcggctgaggtagctgtggtgaataatgctttgaattttgacagcacccctaccaatgcgaaaaagcatcaaccgcagaagcccgacaaaaccgcactggaaaaaatcatccaaagtattatgcctgcacatgcggcaggtgcgatgactaatccgcaggataaggatgctgccatttggataagcaatatccgtaatggcatcacaggcccgattgtgattaccagctatggggtttatgctgcaggttggacagctccgctgatcggtacagcgggtaaattagctatcagcacctgcatggctaatccttctggttgtactgtcatgnnnnncacacacttaattaattaa

SEQ ID NO: 71147 - DNA, 669 bp, Neisseria meningitidis
atgaaaaacctcgccatcttcgacctcgacaacaccctcatcaacaccgattccgaccacgcctggccgcaatacctcatcaaaaaaggcttggttgacgctgccgaaaccgaagcgcaaaacgaaaaattctaccgcgactaccaaaacggctgcctcgacatcgacgcattcctcaaattccacctcgccccgctcgctcgttacagcaaagaagagctggcggaatttcaccgcgaatttatggcggaatacatcatcccccacatctcgcctatgcagcgtatgctggtgcagagccaccaaatggcaggcgacgaaacccttgtgatttcctcaaccaacgagttcatcatcacccccgtctgccgccttttcggcatcaccaacatcatcggcacacaactcgaaaccggttctgacggccgctacaccggcaattacatcggcacgcccagcctcaaagaaggcaaaatcacccgcctgaaccaatggcttgccgaacgcggcgaaacgctccaaagctacggcaaaacctatttttacagcgactccaaaaacgacttgccgctgctgcgccttgtcagcgaacccgtcgccgtcaaccccgatgccgagctggaaaaagaagccaaagaaaaaggctggccggttttgaatttcaaatga

SEQ ID NO: 71148 - DNA, 300 bp, Neisseria meningitidis
gtggttccggtatttgaggctttgattagggatgcggactttcaatatatttttctcagctacaacaacgaaggcttgatgtctgtcgggcaggtaagggagatttttgagtgtttcggcaaatataatttggttcaaacggaataccggcgttttaaggcagataagacagaaaaccgtaatcataaggcaaattcgatattcgaatatctgcatattttagaaaagaccttttatagtggattaacaaaaaccagtacagcgttgcctcgccttagctcaaagagaacgattctctaa

SEQ ID NO: 71149 - DNA, 666 bp, Neisseria meningitidis; identical to SEQ ID NO: 47215

SEQ ID NO: 71150 - DNA, 336 bp, Neisseria meningitidis
atgccgtctgaagcattatccggccttcagacggcattttgttttccgacagtttataaactgtcgttgtttcttgacagaaacaacgaccttatttatttgaaacgattggaggacatgattatgggtttttggaatggtgtggcaaaagcagcaaaagcagtgggagagggaatgattgaagccggcaatgagcataaggcgttgaaaatggaatatgcggagaaatcaagtgaggagctgcatgaaatcgtcaagagtgatggtttttttaaaaattccacacgggagaaaagtgcggcttatgctattttaaaagagcgtggcgaggtgtga

SEQ ID NO: 71151 - DNA, 897 bp, Neisseria meningitidis
ttgaatccgacgaatgatttgaaagcgtggcaacagagggcgcaggcgcaaacagagctgctgctggaacgctttttgccgtctgaaaacgaaataccgcacacactgcacgaagccatgcgttatgcggttttggatgggggcaaacgtctgcggccgatgctggttctggcagcttcggaattaggcgaagccgtgcatgaagcagtagaacaggcaatggcggcaatcgaaatgatccatgcctattcgttggttcacgacgatatgccggcaatggacaacgacagcctgcgtcggggcaaaccgacctgccacatcaaatatggcgaagccaccgcgctactggtcggcgacgctttgcaaacccaagccttcgacgtgttaagccgtccgacagaactgcccgcagcacgccagttggcaatgttgtcggtgttggcgaaagcgggcggcagcgcgggcatggcgggcggtcaggcaatcgatttggcgaatgtcggcaaacaaatggttcaagccgatttggaacagatgcacagcctgaaaacgggtgcgctaatccgtgcggcggttttattgggggcgatgtcctgcccgaatctgtctgaagacagtctggcggtattggacgattatgcggcaaaactggggctggcgttccaagtcattgacgatgtgttggattgtgaagcggacacggcgactttaggcaaaacggcgggcaaagacgcagacaacgacaagccgacttatgtgaaactgatgggcttggaagcggcgcgctcatacgcacacaaactggttgccgaagcggtcgcgctgctcgaacccttcggcgacaaagccctgcgcctgcggcagttggcagaatttgcagtcgcccgcaaatattaa

SEQ ID NO: 71152 - DNA, 546 bp, Neisseria meningitidis; identical to SEQ ID NO: 55191

SEQ ID NO: 71153 - DNA, 828 bp, Neisseria meningitidis
  misc_feature 6, 7, 8, 9, 10: 'n' is a, c, g or t
gtgtgnnnnnttatcgcactggccgttaccgtggtcacctcaggcgcaggaaccggagccgtattgggattaaacggtgcggtctccgccgaaccgatgctggcaagttttttgcaccaaaccgtgttgcgccacgagtccctcggctccgtccttgcctaccacctttccagcaaactcggcagcccgattatggacgtgcgcgcgctgtttgaaatctaccagcaggcgttgggcagcgacacccaaatcggcaaatgcgtcgaagcagacttaaaagccatctacgaacgcgatcccgcctgcgacgaatattcgctgccgcttttatatttcaaaggcttccacgcgattcaggcacaccgcatcaaccaccggctgtatctcgacgggcgcaaaacgctggcgtatttcctgcaaaaccgtatgtccgaagtattcggcgtggacatccatcccgccgcccgtttcggatacgggctgatgctcgaccacgccaccggctttgttgccggcgaaaccgccgtgttgggcaacaatatttcgattttgcacggcgtaacgctcggcggttcgggcaaagaaggcggcgaccgccaccctaaaatcggcgacggcgtgatgatcggcgcaaacgcctcgatattgggcaatatccgcatcggcagcaatgccaaaatcggggcgggcagcgtcgtggtttcagacgtgccgccgtccatcacggttgtcggcgtacccgccaaacccgtggcgcgatcgctcaaaacaccgtcggcggatatggatcaaaatatccagtttaccgaaatcgactttatgatttga

SEQ ID NO: 71154 - DNA, 1887 bp, Neisseria meningitidis
atgatttaccccaaaacctacgacgtgattgtcgtcggtggcggccatgccggtaccgaagccgcgctcgccgccgcccgcatgggcgcgcagacgcttttgctcacacacaatatcgaaacgctcggacaaatgtcatgcaacccttccatcggcggcatcggcaaagggcatttggtacgcgaactcgacgcgctcggcggcgcaatggcgttggccaccgacaaatccggtatccagttccgccgcctgaacgccagcaaaggcgcggcagttcgagccacgcgcgcgcaggccgaccgcattttgtacaaagccgccatccgcgaaatgttggaaaaccaagaaaacctcgaccttttccaacaagccgtcgaagacgtaacgctcgacggcgaacgcatcagcggcgtaattaccgcgatgggcgtggagtttaaagcacgcgccgtcgtgttgaccgcaggcacgtttttgtccggcaaaatccacatcggtttggaacactacgaaggcggacgcgccggcgaccccgccgccaaatcgctgggcggacgtttgcgcgaattgaagctgccgcaaggccgtctgaaaaccggcacgccgccgcgcatcgacggacgcacgattgacttttcccaactgaccgaacagcccggcgacacgcccgttcccgtcatgtccgtacgcggcaacgccgaaatgcacccgcgccaagtgtcctgctggattacgcataccaacacgcaaacccacgacatcatccgctcaggcttcgaccgcagcccgatgtttaccggcaaaatcgaaggcgtgggcccgcgttattgtccgtctatcgaagacaaaatcaaccgcttcgccgacaaagacagccaccagattttcctagaacccgaaggcctgactacgcacgaatactaccccaacggtatctccaccagcctgccgttcgacatccaaatcgcgctcgtccgcagtatgaaaggtttggaaaacgcccatatcctgcgccccggctacgccatcgaatacgactacttcgatccgcgcaacctcaaagcaagcctcgaaaccaaaaccattgccggattgtttttcgccgggcaaatcaacggtacgacaggttatgaagaagccgccgcgcaaggactgctggcaggcgcgaacgccgtgcaatacgtccgcgaacaagacccgctcctgctgcgccgcgaacaagcctatctcggcgtattggtggacgacctcatcaccaaaggcgtgaacgaaccctaccgaatgttcaccagccgtgccgaataccgcctgcaactcagggaagacaacgccgatatgcgcctgaccgaagacggctacaaaatcggcttggtgggtgaagcgcaatggcgcatgttcaacgaaaaacgcgaagccatcgaacgcgaaatccaacgtttgaaaacaacgtggtacacgccgcaaaaactcgccgaagacgaacaaatccgcgtattcgggcaaaagctcagccgcgaagccaacctgcacgacctcctgcgccgcccgaacctcgactacgccgcgctgatgacgctcgaaggcgcgatgccgtctgaacgcctctccgccgaagtggtcgaacaagtcgaaatccaagtcaaataccaaggctatatcgaccgccaaaacgaagaaatcgacagccgccgcgacatcgaaaccttaaagctgcccgaggatatcgattacagcaaagttaaaggtttgtcggcagaagtgcagcaaaagctcaaccagcacaaacccgaaaccgtcgggcaggcaagccgcatttccggcgtaacccctgcggcagtggcattgctgatggtgcatttgaagcgcgggtttaaagacgcgaaataa

SEQ ID NO: 71155 - DNA, 204 bp, Neisseria meningitidis; identical to SEQ ID NO: 61802

SEQ ID NO: 71156 - DNA, 777 bp, Neisseria meningitidis; identical to SEQ ID NO: 62768

SEQ ID NO: 71157 - DNA, 492 bp, Neisseria meningitidis; identical to SEQ ID NO: 45059

SEQ ID NO: 71158 - DNA, 756 bp, Neisseria meningitidis; identical to SEQ ID NO: 38725

SEQ ID NO: 71159 - DNA, 810 bp, Neisseria meningitidis; identical to SEQ ID NO: 70987

SEQ ID NO: 71160 - DNA, 906 bp, Neisseria meningitidis
atgcttaccttccaacaaatcatcttcaaactgcaaacattctgggcagacaaaggctgcaccgtcatccaacccttcgacatggaagtcggtgccggcacatcccatcccgccacctgcctgcgcgcactcggccccgagccttggtttgccgcctacgtccaacccagccgccgccccaaagacggccgctacggcgacaaccccaaccgcctgcaacactattaccaattccaagtcgccctcaagcccgctcccgccaatatccaagacctctatctcgactctctgcgcgaattgggcatcgatcccaaagtccacgacatccgctttgtcgaagacgactgggaaaaccccaccctcggcgcgtggggtttgggctgggaagtctggctcaacggcatggaagtaacccagtttacctatttccaacaagtcggcggcatcgactgcacccccgtactcggcgaaatcacctacggcatcgaacgcttggcgatgtacctgcaaggcgtggaaaacgtctatgacctcgtttgggcaaaaacgctggacggtaatacagtaacttacggcgatgtgtaccaccaaaacgaagtcgaacaatccacctacaacttcgaatacagcgatgccgactggctgctgcgccagttcaacgactacgaagcgcaagccaaacgcctgcttgccgaagaaaacgccgccctcgccctgcctgcctacgagcttgtcctcaaagcggggcatacgttcaaccttttagacgcacgcggcgcgatttccgtaactgagcgggcaacttatattggacgtattcgtgcattgagccgcgccgtggcgcaaaaatatgttgaaagccgcgaaaaactgggcttccctttaatgaaggcaaacgccgcctaa

SEQ ID NO: 71161 - DNA, 1497 bp, Neisseria meningitidis; identical to SEQ ID NO: 54507

SEQ ID NO: 71162 - DNA, 1155 bp, Neisseria meningitidis; identical to SEQ ID NO: 55455

SEQ ID NO: 71163 - DNA, 987 bp, Neisseria meningitidis
atgaaacggtacgtttgcctccggcatcaggtcggggattttcccgtaaagtggcaaaagcgtttttttgccactaaaatctacaccctatacttttcggacaggggcgcggaaatggaaatatggaatatgttggacacttggctcggtgccgtcccgatacgtgcggaggcggtcgaatccgtggcggcggttgcggctttgctgctggcgcgcgcccttctgttgaatatccacttcaaacggcatccggatttcggcatcgaaagcaagcggcggtttttggttgccagccgcaatataacgctgcttttggtgctgttttcgctggcatttatctggtcggcgcaaatccaaacgctggctttgtcgatgtttgcggtggcggcggcggtcgtcgtggcgacgaaggaactgattatgtgtctgtcgggcagtattttaaggtctgccacccagcaatactcggtcggcgactatatcgaaatcaacggcctgcgcgggcgcgtggtcgacatcaacctgttgaacacgctgatgatgcaggtcggtccgaaccccttggtcggacagcttgcgggaaccaccgtttctttccccaacagcctgttgttgagccaccccgtgcgccgcgacaatattttgggcgactatgtcatccatacggtcgaaatccccgttcccatccatttggattcggatgaagccgtatgccgtctgaaagccgtactcgagcccttgtgcgcgccctacatccccgccatccaacggcatttggaaaacgtgcaggcggaaaaactgtttatcacgcccgccgccagaccgcgcgttacccgcgtgccgtacgatgacaaggcataccgcatcatcgtccgcttcgcctcccccgtttcaaagcggctggaaatccaacaggcggttatggacgaatttttgcgcgtacaataccgcctgttaaattaccccgccggctccgaaacactttaa

SEQ ID NO: 71164 - DNA, 219 bp, Neisseria meningitidis; identical to SEQ ID NO: 54559

SEQ ID NO: 71165 - DNA, 672 bp, Neisseria meningitidis
atgacgacacaagacgaactcaagcgcatcgccgccgaaaaagcagtcgaattcgtacccgaaaacgaatacatcggcatcggtaccggttcgaccatcaactttttcatcgaagccttgggtaagagcggcaaaaaaatcaaaggcgcggtatctacttccaaaaaatccagtgaactgcttgcccaatatgatattcccgtcgtttccctgaacgaagtatcggggttggcggtctatattgacggtgcggatgaagtgaaccacgccctgcaaatgattaagggcggcggcggcgcgcacctcaacgaaaaaatcgtcgccagcgcatccgaaaaattcatctgcattgcggatgaaagcaaatatgtttcacgtttgggcaaattccctctgcccgtggaagtcgtcgaaagcgcgcgttcccttgtttcgcgcaaactgctcgctatgggcggacagcctgaattgcgtatcggctacaccactttttacggcaaccaaatcgtcgatgtccacggcttgaatatcgacaaaccgctgacgatggaagacgaaatcaacaaaatcaccggcgtactcgaaaacggaatattcgcccgcgatgccgccgatgtgttgattttggggacggaagagggtgcgaaagtcatctatccctgccaagggtaa

SEQ ID NO: 71166 - DNA, 1041 bp, Neisseria meningitidis; identical to SEQ ID NO: 55816

SEQ ID NO: 71167 - DNA, 783 bp, Neisseria meningitidis; identical to SEQ ID NO: 65847

SEQ ID NO: 71168 - DNA, 2262 bp, Neisseria meningitidis
atgttacaaatcgaaatcgacggcaaacaggtatctgtggagcagggcgcgacggtgattgaagccgcgcacaagctcggtacttatattccgcatttctgttaccacaaaaaactttccatcgccgccaactgccgtatgtgtctggtgaacgtagaaaaagccccaaaacctctgcctgcctgtgccacgccggttacagacggcatgattgtgcgcacgcattcggcaaaagcccgagaggcgcaagaaggcgtgatggagttcctgctcatcaaccatccgcttgattgtccgacctgcgaccaaggcggcgaatgccagttgcaggatttggcgatgggctacggcaaaaccaccagccgttataccgaagaaaaacgttctgtcgtcggcaaggacatgggtcctttggtttccgccgaggaaatgagccgttgtatccactgtacccgttgcgttcgtttcactgaagaaatcgccggcgtgcaagaaatcgccatggccaaccgcggcgaacattccgagatcatgccttttatcggcaaagcagtggaaaccgaattgtcaggcaacgtcatcgatttgtgtcctgtcggcgcattgaccagcaaaccgttccgcttcaacgcgcgtacttgggaattgaaccgccgcaaatccgtttccgcccatgatgctttgggcagtaacctgattgtacaaaccaaagaccatactgtccgccgagtgttgccgttggaaaacgaagcgattaacgaatgttggctgtctgaccgcgaccgttttgcctatgaaggcctgtatcacgaaagccgtttgaaaaacccgaaaatcaaacagggcggcgagtggatggacgtggattggaaaaccgcgttggaatatgtccgcagcgcgattgaatgtatcgccaaagacggcaaccaaaatcaagtcggcgtttgggccaatccgatgaatacggttgaagagctgtatttggccaaaaagcttgccgacggcttgggtgttaaaaactttgccacccgtctgcgccaacaagacaaacgtctttcagacggcattaaaggtgcgcaatggttgggacaaagcattgaatctttggctgacaacgatgccgtattggtagtcggcgcgaacttgcgcaaagagcagccgctcttgaccgcccgcctgcgccgcgccgccaaagaccgtatggctttgagcgtattggccggcagtaaagaagaattgtttatgccgcttctgtctcaagaagccgcacatcccgacgagtgggcaggccgtctgaaaaacctgtctgtcaatgcggaacacgccgttaccgccagcctgaaaaatgctgaaaaagcagcggtgattttgggtgcggaagtgcaaaaccatcctgattacgccgcgatttatgccgccgttcaagagctggcagatgcgaccggcgcagtgctgggtattttgccgcaagccgccaacagcgtcggtgcggatgtcttgggcgtaaactccggcgagagcgttgccgaaatggcaaacgcgccgaaacaggcagtcttgctgctcaacgtcgagccggaaatcgatatggttgacggtgcaaaagccgtggccgcgttgaaacaggcgaaaagcgtgatggcgtttacaccgtttgtcagcgaaacgctgctggacgtgtgcgacgtattgctgccgattgcgccgtttaccgaaacctcgggcagcttcatcaatatggaaggccgtctgcaatcctttcacggcgtggtacaaggcttcggcgattcgcgtccgatgtggaaagtgttgcgcgtattgggcaacctgtttgacctgcaaggttttgaataccacgataccgctgcgattctgaaagatgcgttggatgcggaaagcctgccgtccaaactggacaaccgcagcacatggacaggggagggcgttcagacggcatcagaccgcctcgtccgtgtcggcggcgtcggtatttatcacactgattctatcgtgcgccgttccgcaccgttgcaggcaaccgtccatgccgccgtgcctgccgcgcgtgtgaatccgaacactttgggacgcttgggcctgcaagacggacaaaccgctgtcgccaaacaaaacggcgcaagcgtatcggttgctgtcaaagccgatgccggtttgcctgaaaacgtggtgcatctgccgctgcataccgaaaatgccgcgctgggtgcgttgatggacactattgaactggcgggagcttga

SEQ ID NO: 71169 - DNA, 1563 bp, Neisseria meningitidis; identical to SEQ ID NO: 61335

SEQ ID NO: 71170 - DNA, 468 bp, Neisseria meningitidis
ttgaatccgcaatatctcgttatcggccccggtccgtgttcgcccaaagaagcggggatttccgtggcggcgatgcgccatttcgccggccggctgccgattatgggcgtgtgcctcgggcatcagacgataggcgaggcgttcggcggcaggatagtccgcgccaaaacgctgatgcacggcaaggtgtcgcccgtgtcccattcgggcaagggtatgtttatggggttgcccaatccggttacctgtacgcgttatcacagcctcgttatcgaacgcggcacactgcccgaatgtttggaaatcacggcatggacggaagacggcgagattatgggcgtgcgccataaggaatatgccgtcgagggcgtgcagttccaccccgaagccctcttgaccgaacacggacatgatatgttgaacaattttttaatcgaatttcaaaacttcaaaccgcaaaaaatctga

SEQ ID NO: 71171 - DNA, 246 bp, Neisseria meningitidis; identical to SEQ ID NO: 37539

SEQ ID NO: 71172 - DNA, 465 bp, Neisseria meningitidis
atgattgagatgagtaaagattaccgaaacgatttgtacgatgtatatgtttcttacccgccccaagtggatcgcgggcttatccgggagtgcctcagggagaatctcggcgaggaaaaggcggaaggattgatcgaatcgctcgattccaaaccgcaagtgctggttgaggaaaaatgcacttgggcgaaacgggaagagttgcatgattatttcagctatttgggtttggatattattacccggagatatatggagttggaaacggtcgtgccgccggaggaaggggagggcgaaggagaaggagcggatggggaaatgcccgaatatcttgaacttcatggcgggcgggaagatgatatttccgcaccttcgcaacccgaaccgccgccccgcaatatcaaaccgctggttttcgggctgctgattgcctttttgagctatctgctcggtaagattttttga

SEQ ID NO: 71173 - DNA, 1968 bp, Neisseria meningitidis
gtggggaacacctttaaatcaatccttgtctgggtcgccttgggtatcggcctgatggctgcgttcaacgctttagacggtaaaaaagaagacaacgggcaaatcgaatattctcagttcatccaacaggtcaacaacggcgaagtatccggtgtcaacatcgaaggatccgtcgtcagcggctacctgattaagggcgagcgcaccgacaaaagcaccttcttcaccaacgcgcctttggacgacaacctgattaaaacactgctcgacaaaaacgtccgtgtaaaagtaacgccggaagaaaaaccgagcgcgctggctgccctgttttacagcctgctgcccgtcctgctgctgattggcgcgtggttctactttatgcgtatgcagacgggcggcggcggaaaaggcggcgcattctcattcggcaaaagccgcgcccgcctactggacaaagatgccaacaaagttacctttgccgatgtcgccggctgcgacgaagccaaagaagaagtgcaggaaatcgtcgattacctcaaagcgccgaaccgctatcaaagcctgggcgggcgcgtgccgcgcggcatcctgctggcgggcagcccgggtacgggtaagacgcttttggcgaaagcgattgcaggcgaagccggcgtgccgttcttcagcatttcaggttccgactttgtcgaaatgttcgtcggtgtcggtgcgagccgcgtccgcgatatgttcgagcaggcgaagaaaaacgccccctgcatcatctttatcgacgagattgacgcagtcggccgccaacgcggcgcaggtttgggcggcggcaatgatgagcgcgagcaaacattaaaccaattgttggttgaaatggacggttttgagagcaatcagactgtaattgtgattgcggcaaccaaccgccccgacgtactcgatcctgcgctgcaacgccccggccgtttcgaccgccaagtcgtcgtccccctgccggacatccgggggcgcgaacagattttgaacgtccattctaaaaaagtgcctttggacgaatctgtggatttattgtccctcgcgcgcggcacgccgggtttttccggtgcggatttggcaaacctggttaacgaagccgccctgtttgccggccgccgcaacaaagtcaaagtcgatcaaagcgattttgaagacgcaaaagacaaaatctatatgggtccggaacgccgcagtatggtgatgcacgaagacgaaaaacgtgcgacggcgtatcatgagtccggacacgcgattgttgccgaaagcctgccctttaccgaccccgtccacaaagtaaccattatgccgcgcggacgtgcgctgggtctgacttggcagcttccggagcgcgaccgcatcagtatgtataaagatcagatgttgagccagctctccatcctgttcggcggacggattgccgaagacatcttcgtcggacgcatctccaccggcgcatcaaacgactttgaacgcgcaacccaaatggcgcgcgaaatggtaacgcgctacggcatgagcgacaaaatgggcgtgatggtttatgcggaaaacgaaggcgaagtcttcttgggacgcagcgtaacccgttcgcaaaacatttccgagaaaacccagcaggacatcgacgcggaaatccgccggattttggacgagcaatatcaggttgcctacaaaatcctcgatgaaaaccgcgacaagatggaaacgatgtgcaaagccctgatggaatgggaaaccatcgaccgcgatcaggtactggaaatcatggcgggcaaacaacccagcccgcccaaagattacagccacaacctgcgcgagaatgcggacgcggcggaagataacgcgccgcacgctccgactcgggaagaaaccgaagcacctgccccggcagacaccgcttcgacagagtccgagcagcagcctgaaaacaaggcttaa

SEQ ID NO: 71174 - DNA, 645 bp, Neisseria meningitidis
gtgaacaaacggctgttttgcagccgcaacggcttgcgctattacctgttgggcggtttctgtttgagtgtttttccgcttttgctggtgtttgcctcatccgtttgggcggtttatcggacgggcgggcaggttttgccgccgtatgtccgggcggatgccgcgctggtgttgggtgccgccgcatgggacaaacgcccttcccctgtttttcgggaacgcatcaaccacgccatcgcgctttaccaaagccgcagggtaggcaaaatcgtgtttacgggaggccggaccaaaaaaggctatatgaccgaagccgaggtcgggcggcggtacgcactcaaacagggggttccggcgcgcaacatcctgtttgaaaacacttcgcgcaacacttatgaaaacctgaacaacatccgtccggttttgcgtgccaacggtattgccagcgtggtgattgtcagcgatccctaccatttggcgcgggcggcggaaatggcggaggatttgggtgtccgcgtttatatgtctgccacgccgaccacgcggtttgatgcgggaaataagaaaaaaatctttatgctgcaagagggatatgcgttatccctctaccgtttggaaaaatgggggcgggattttttcaattag

SEQ ID NO: 71175 - DNA, 345 bp, Neisseria meningitidis; identical to SEQ ID NO: 42101

SEQ ID NO: 71176 - DNA, 279 bp, Neisseria meningitidis
atgccggccgtcgatttgatccgcgaacgcctgcagacgctcgatccgctggtgttggaaatcggcgatgagagccatctgcacaaaggacacgcgggcaataccggcggcggacattatgccgttttggtcgtcagcggccgttttgaaggcgtaagccgcctgaaccgccagaaaacggtcaaatcgctgctcaaagatttgttttcagacggcatcatccacgcgctcggcatccgggcggctgcccctgacgagtatttccatacggcggactga

SEQ ID NO: 71177 - DNA, 966 bp, Neisseria meningitidis; identical to SEQ ID NO: 45729

SEQ ID NO: 71178 - DNA, 333 bp, Neisseria meningitidis; identical to SEQ ID NO: 55486

SEQ ID NO: 71179 - DNA, 1542 bp, Neisseria meningitidis
atgaaaatcggcatcccacgcgagtcattatccggcgaaacccgcgtcgcctgtacgcccgccaccgtcgccctgctgggcaaactgggctttgaaaccgttgtcgaaagcggtgcaggtttggcggcaagtttggacgatgccgcttaccaaacagcaggcgcaaccgttgccgacaaagcggcggtttgggcctgccctttgatttataaggttaacgcgccgtccgaaggcgagctgccgcttttgaacgaaggtcaaaccatcgtcagcttcctgtggccgcgccaaaacgaggctttggtcgaagccttgcgcgccaagaaagtcaatgcgctggcgatggacatggtgccccgtatttcccgcgcgcaggctttggacgctttgtcttcgatggcaaacatcagcggctaccgcgccgtaattgaagccgccaacgccttcggccgtttcttcaccggtcaaatcaccgccgccggcaaagtgccgcccgcgcaggttttggtgattggtgcaggtgtggcaggtttggcggcgatcggtacggcaaactcgctcggcgcagtggtacgcgcgttcgatacccgcttggaagtggcggaacaaatcgaatcgatgggcggcaagttcctgaaactcggcttcccacaagaatcgggcggcagcggagacggctacgccaaagtgatgagcgacgaatttatcgcagccgagatgaagctctttgccgagcaggcgaaagaagtggacatcatcatcaccaccgccgccattccgggcaaacccgcgcccaagctgattaccaaagaaatggtggaaagcatgaaatccggctccgtcatcgtcgatttggcggcggcgacgggcggcaactgcgaactcacccgcccgggcgaattgtccgtaaccggcaacggcgtgaaaatcatcggctacaccgacatggcaaaccgccttgccggacagtcttcccagctttacgccaccaacttggtcaacctgaccaagctgttaagcccgaacaaagacggcgaaatcacgttggacttcgaagacgtgattatccgcaacatgaccgttacccgcgacggcgaaatcaccttcccgcctccgccgattcaagtttccgcccagccgcagcaaacgtcgtctgaaaaagccgcgcctgccgccaagccggagccgaaacccgttcccctgtggaagaaactcgcgcccgccgtcatcgccgccgtgttggtgctgtgggtcggcgcggtcgcgcccgcagcatttttgaaccacttcatcgtgttcgtcctcgcctgcgtcatcggctactacgtcgtctggaacgtcagccactcgctgcataccccgctgatgtccgtgaccaacgccatctccggcatcatcgtcgtcggcgcgctgctgcaaatcagccaaggcaacggcttcgttaccctgcttgccttcatcgccatcctgattgccagcatcaacatcttcggcggctttgcggtaacacggcgtatgctgaatatgtttaagaaagggtaa

SEQ ID NO: 71180 - DNA, 810 bp, Neisseria meningitidis; identical to SEQ ID NO: 54299

SEQ ID NO: 71181 - DNA, 372 bp, Neisseria meningitidis; identical to SEQ ID NO: 41171

SEQ ID NO: 71182 - DNA, 348 bp, Neisseria meningitidis; identical to SEQ ID NO: 38212

SEQ ID NO: 71183 - DNA, 1746 bp, Neisseria meningitidis
atggaacggcagacagatgaatttgcccaagcggcggcaagggcggcaatctggtttttggcacgctatgcgggttcaggcagcgaagtgcttgcaaactgcaccgaacgcctgtttcaggcattgcaaaacggtcattcgtttatccgtttgagcggtggcgaggctgacgcgctgtcggcactcgcacccgtggtcggaacatccgccgcgcctttgattttggaaggcagaaggctgtttttgggcaggatgtggcagttggaatacgatttggctgccgagataaaacgcttggcggcagccggcacgtccgcccccgacgcggcaggcgcgcggcaaaacctcgcaaaatggtttcaaggcacgggcagcgaagggcagcgcgatgccgccgccttggcactgttgcagtcttttatggtgattaccggcgggccaggaacgggcaaaacgacaacggttgccaaactgctggcgctgatttgcggtgaagacgaaaatcttcccaacatcgcgcttgccgcaccgacaggcaaagcggcggcacatatggcgcgcgcgctgcaccgtgcaatcaacggttttgacgcgccggaggccatccgccgccatttgctcaaactggaagggcaaaccgtccaccgactgctgaagctgcgcccgcccaaaatgcaggcggcgttcaaccctgtttacccgctgccgtttgacgtattggttatcgatgaagcctctatgctggatacggcattgatgctgcaacttttaaaagcggtcaaaaccggcgcgcgcgtgattctgctgggggatgaaaaccagctcccgtccgtcggaataggggcggtgctgtccgttttgtcacaaaaaaccgttttggacggagaaacgcaccaaaggctggccggcttccttccggaacacggtttcagcgtcagcgcaaatccacccgtgttggcgcaaaacaccgcccatctgtcgttcagccaccgcttcggcgacaacagcggcatcggctgccttgcccgtgccgccgtatcgggcgatgaaggggcgtgggcattgtttgaccggtttccggacgaactggaacattcggaatgcagtccgaacgctcgagtcgaaaggttgtaccgggcgcacaaagcctattggcaggcggtaaaagacggcaatatcgaagccgcatacgcaggcatctcggatatcgtcgtcctcgcggcgtggcggcaggatgcggaagacttcaacgaagcctattgccgccatgtacgccgcaaaatgaacataccggaacatcaggcctatttcgccggagaaccgattatgatcagacagaacgactacgcgcttgaactgttcaacggcgacatcggattgattatggaagatgtcggacggcagggcggccttgccgcctattttgccgatgcggacggatttaaaaaggtagcggtaagctgcctgcccgatttcgaacccgcattcgccatgaccgtccacaaaagccaaggttcggaatatcgggaagtctggctgctgccgccttccgccgcaccttcggacgaaggggacgacgcgctttcgggcttgagcagagggctgctttacacagccattacccgcgcgagagagaagttcgtattcttcggcggggaagaagccttccggcaagctgccgtcaccgtcaaaacgcgtcagacggcgttgggcagtatgctcgagcgggtattttcacaagaataa

SEQ ID NO: 71184 - DNA, 2298 bp, Neisseria meningitidis
atgcaaccgcacgctccacataccgattccaatacgctgatgctcggccgatacgccgaacgcgcctatctcgaatacgccatgagcgtggtcaaaggccgcgcgctgcctgaagtttcagacggccaaaagcccgttcagcggcgcattttgtttgcgatgcgcgatatgggtttgacggcgggagcgaagccggtgaaatcggcgcgcgtggtcggcgagattttgggtaaataccacccgcacggcgacagttccgcctatgaggcgatggtgcggatggcgcaggattttaccttgcgctatcccttaatcgacggcatcggcaacttcggttcgcgtgacggcgacggggcggcggcgatgcgttacaccgaagcgcggctgacaccgattgcggaattgctgttgtccgaaatcaatcaggggacggtggatttcgtgccgaactacgacggcgcgtttgacgaaccgctgcacctgcccgcccgcctgcctatggtcttgctcaacggtgcgtcaggcattgcggtgggtatggcgaccgaaatcccatcacacaatttgaatgaagtcacacaggcggcgattgcactgttgaagaagccgacgctggaaaccgccgacctgatgcaatacatccctgctcccgattttgccggaggcggtcaaatcatcacgccggcggacgaattgcgccgtatttacgaaaccggcaagggcagcgtgcgcgtgcgtgcgcgttacgaaatcgagaagctggcgcgcggacaatggcgcgtcatcgtaaccgagctgccgccgaacgccaattccgccaaaatccttgctgaaatcgaagaacagaccaacccgaaaccgaaagcaggcaaaaagcagctcaaccaagaccagctcaatactaaaaagctgatgctggatttaatcgaccgcgtgcgcgacgagtcggacggcgaacatcccgtgcgccttgtatttgaaccaaaatccagccgcatcgataccgataccttcatcaacacgctgatggcgcaaacttcgctggaaggcaatgtgtccatgaacttggtgatgatggggctggacaaccgccccgcgcagaaaaacctgaaaacgattttgcaggaatggttggatttccgcaccgttaccgtaacacgccgtctgaaattccgtttgaaccaagtggaaaaacggctgcacatcctcgaaggccgtctgaaagtctttctgcacatcgacgaagtgattaaagtcatccgcgaatcagatgacccgaaagccgatttgatggcggcgttcgggctgaccgaaatccaagccgaagacattttggaaatccgcctgcgccagttggcacgtttggaaggtttcaaactcgaaaaagaattgaacgaattgcgcgaagaacaaggccgtctgaacatccttttgggcgatgaaaacgaaaagcgcaagctgattatcaaagagatgcaggcggatatgaaacaatacggcgatgcacgccgcacgctggtggaagaggccggacgcgccgtgctgacacaaaccaccgccgacgaacccatcacactgattctgtcggaaaaaggctggatacgcagccgtgccggacacaatctcgatttgagccaaaccgcgttcaaagaaggcgaccgcctcaaacaaacccttgaaggcagaacggttttacccgtcgtcatcctcgattcattgggcagaacctatacactcgatgccgccgaaattcccggcggacgcggcgacggcgtgccggtttcatccttgatcgagttgcaaaacggcgcgaaacccgttgcgatgttgacaggattgccggaacaacattatttattatcaagcagcggcggctacggcttcatcgccaagttggctgatatggtcggacgcgtaaaagcgggcaaagtggtgatgaccacagacagtggcgaaaccgtcctgccgccgattgccgtctatgcctcctcgttcatcaaccccgactgcaaaatcattgccgccaccagtcaaaaccgcgccctcgccttccccatcggcgaattgaaaattatggcgaaaggcaaagggctgcaaatcatcggattaaacgccggcgaatcgctgacgcataccgccgtttcttccgagccggaaatcctgattgaaagcgaaggcaggcgcggcgcggcgcacaaagaccgcatccccgtctccctgcttgaggcaaaacgcggcaaaaaaggcaaactattacccatatcgggcagcctgaaacagctttcttcccccaaataa

SEQ ID NO: 71185 - DNA, 1911 bp, Neisseria meningitidis
atgactctggaaaccctgatcgccctgccgcgcaacatcaagaaaatctgtttcctcatacacgattttctgatgattttcattgccttttggttcacccaaagcctaaaggccgactactcggacgaatggttcgaccccgccaactggcagtctttcctattgaccgcgtttttgaccgcctgcctgttcttcagaatggggctttaccgcgccgtcacacgcttcatcagcttccgcatcctctccaccgcgctggcaggcagcctcgcctccgccgtattgtttttcctcaatacgctgatatttgaagaacggctgcggctcgccctgccgattgtctatttcttactgctgtttgtttccgtgaccggctcgcgtatggttttgcgcggactgttgtccgaacaccccaaaaaacagatggcccccgtcattatttacggcgcgggacggtcgggcagacaactgcttaaggccgtcaaacaaatgcgcgaatattccgccgccgcctttgtggacgacgaccccaaactgtggcacaccgtcatctacgaccttgccgtttaccagcccgatgccatcgccttcctcatcgaacgctacggcgtggaaaaaatcctgctcgccatccccggcgcgactcaggaacaacgcctccgaatcatcaacaaactggaagcctatccctgcgaagtgttgaccattcccggaatgaaagacctgatggacggaaaaatcagcatcggcacgctcaaaaaaatctctgtgtccgacctgctcgggcgtgattccgtcgcaccagacgaccgcctcatgaatgccgacatcgaaggcaaaaccgtcatggtaaccggagcgggcggctccatcggttcggaactctgccgccagattatccgccgccgccccgaaaagctgctgctgttcgagttatccgaattcgccctgtacgccatcgaaaaagaattgcgcgaaacctgcatccaaaaacgcctcgataccgaaatcctgccctttctcggttcggtgcaaaaccgcacgctgctcgaacacgtcatgaccgccttttccgttgcgaccgtctatcacgccgccgcctacaaacacgtccccatggtcgagttcaacaccgtcgaaggcatacgcaacaacatcttcggcacactcgagtgcgcgcttgccgccacggcatcgggcgtaagaactttcgtcctcatctccaccgacaaagccgtccgccccaccaacaccatgggtgccggcaaacgcatggcggaactctgccttcaagcgctcgccgccgaacccggacaaaaaacccgcttcagcatggtgcgtttcggcaatgttttaggttcgtccggctccgttgtcccgctgtttgaaaaacagattgccgaaggcggcccgcttaccctgacccaccctgaaatcacacgatatttcatgaccatacccgaagccgcccaactcgtcatacaggcaggtgcgatgggtacgggcggcgacgtattcgtcctcgacatgggcgaatccgtcaaaatcatcgaccttgcccgccaaatgattaccttaagcggcctcaaacccaaaacacccgaacaacccgacggcgacatcgaaatcctcattaccggactgcgtcccggagaaaaactctacgaagagctgctcatcggcgacaacgtccgcaaaaccggccatccgcgcattatgacggctgacgaggcgatgctgccgtggcacgagctctctgtcctgctcgaccgcatccgtgcggcctgcgaccgttacgaccagcaggcaatccgcaccctgctcataaacgccccgaccggctttaccccaagcgacggtatctgcgacctgctttgggtacgagaaacacacagaaaaaatgccgtctga

SEQ ID NO: 71186 - DNA, 288 bp, Neisseria meningitidis; identical to SEQ ID NO: 42374

SEQ ID NO: 71187 - DNA, 486 bp, Neisseria meningitidis
atgagatttttcggtatcggttttttggtgctgctgtttttggagattatgtcgattgtgtgggttgccgattggttgggcggcggctggacgttgtttttgatggcggcaggttttgccgccggtgtgctgatgctcaggcatacggggctgtccggtcttttattggcgggcgcggcaatgagaaacggcggaagagtatccgtttatcagatgttgtggcctatccgttatacggtggcggcggtgtgtctgatgagtccgggattcgtatcctcggtgttggcggtattgctgctgctgccgtttaagggaggtgcagtgttgcaggcaggaggtgcggaaaattttttcaacatgaaccaatcgggcagaaaagagggcttttcccgcgatgacgatattatcgagggggaatatacggttgaagagccttacggcggcaatcgttcccgaaacgccatcgaacacaaaaaagacgaataa

SEQ ID NO: 71188 - DNA, 921 bp, Neisseria meningitidis
atgagaatcaggctggggcggcacaacgcgcccgactttccgcacggggccgccgtaaccataggcaattttgacggcgtacacctcggacacaaacacatcctccaaaaactccgcctcgaagccgatacgcgcggattacccgtcgtgaccgtcgttttcgaaccccaacccaaagaatttttcgcactccgcaccggcaggatgccaccgtgtcggatcagccccctgcgcaccaagctcgaattattggaaggcacaggctgtgtcgatgccgtctgggttttgcgtttcgatcaaaatttttccgaaatatccgcgcaagggtttatcgaccgcctgctgcgtcaaaccttgaatacgcgttatttgctcgtcggcgatgatttccgtttcggtgcggggcgggaaggctgttttgaacttttggcacaacagcccgatatgcagaccgagcgtacgccttccgtcatcgtcgaagacatccgcaccagcagtaccgccgtgcgacaagccctttcagacggcaaccttgcctatgcgaaaaaacttttgggacacgactacgtcttgagcggcagggtggtgcacggcagaaaactcggacgcaccttaaacgccccgactgccaacatccgcctgccccgccaccgttatgcactcggcggcgtgttcgtcgtcgaagcggacggcgcattcggcacgcggcgcggcgtggcgagcttcggtttcaatcccaccgttgatagcggctgttctcaaaagcttgaagtccacctgttcgactttcaaggcgacctgtacggacaacggctgaacgtccgcttcctgcacaaactgcgcgatgaagaaaagtttgatggtatggcagaactgaaaaggcagatagcagccgatatggaagccgcaaagtgttggtag

SEQ ID NO: 71189 - DNA, 1212 bp, Neisseria meningitidis; identical to SEQ ID NO: 61744

SEQ ID NO: 71190 - DNA, 759 bp, Neisseria meningitidis
atgaaaaaagtcagcgtattgattgttgccaaaaacgaagcaaaccacattcaggaatgtattgaaagttgccgtttcgataaagaagtcatcgttatcgacgactacagcaccgacaatactgccgaaattgccgagggtttgggcgcaaaagtcttcagacggcatttgaatggggatttcggagcgcaaaaaacatttgccatcgaacaggcaggcggagaatgggttttcctgattgatgcagacgaacgctgcacgccggaactatctgatgaaatctcaaaaattgtccaaaccggcgattatgccgcctattttgtcgaacgccgcaaccttttccccaaccatcccgccacacacggcgcgatgcgtcccgacagcgtatgccgtctgatgccgaaaaaagacagttcggtgcaaggcaaagtacacgaaaccgtacaaaccccctaccccaaacgccgtctgaagcattttatgtaccattacacatacgacaactgggaacaatatttcaacaagttcaacaaatatacttccatttcagccaaaaaataccgagagcagggaaagcccgtgcgtttcgttagggacattatcctccgcccgatttgggggtttttcaaaatttatatcctgaacaaagggtttcttgatggaaaaatgggttggattatgtccgtcaaccacagctattacacgatgattaaatatgtcaaactatattatctgtacaaatccggcggaaaattttaa

SEQ ID NO: 71191 - DNA, 966 bp, Neisseria meningitidis
atgagctacacgcaactgacccaaggcgaacgataccacatccaatacctgtcccgccactgcaccgtcaccgaaatcgccaaacagcttaaccgccacaaaagcaccatcagccgcgaaatcagacggcaccgcacccaagggcagcaatacagcgccgaaaaagcccagcggcaaagccggactatcaaacagcgtaagcgacaaccctataagctcgattcgcagctgattcagcacatcgacacccttatccgccgcaaactcagtcccgaacaagtatgcgcctacctgcgcaaacaccaccggatcacgctccaccacagcaccatttaccgctaccttcgccaagacaaaagcaacggcagcacgttgtggcaacatctcagaatatgcagcaaaccctaccgcaaacgctacggcagcacatggaccagaggcaaagtacccaaccgtgtcgtcatagaaaaccgacccgctatcgtcgaccagaaatcccgtatcggcgattgggaagccgacaccattgtcggcaaaggacagaaaagcgcattattgaccttggtcgaacgcgttacccgctacaccatcatctgcaaattggatagcctcaaagccgaagacactgcccgggcagctgttagggcattaaaggcacataaagacagggtgcacaccattaccatggataacggcaaagagttctaccaacacaccaaaataaccaaagcattgaaagcggagacttatttttgtcgcccttaccattcttgggagaaagggctgaatgagaacaccaacggactcatccggcaatacttccccaaacaaaccgatttccgtaacatcagtgatcgggagatacgcagggttcaagatgagttgaaccaccgaccaagaaaaacacttggctacgaaacgccaagtgttttattcttgaatctgttccaaccactaatacactag

SEQ ID NO: 71192 - DNA, 1266 bp, Neisseria meningitidis; identical to SEQ ID NO: 55246

SEQ ID NO: 71193 - DNA, 291 bp, Neisseria meningitidis; identical to SEQ ID NO: 43707

SEQ ID NO: 71194 - DNA, 681 bp, Neisseria meningitidis; identical to SEQ ID NO: 55623

SEQ ID NO: 71195 - DNA, 588 bp, Neisseria meningitidis
ttgaatattaaactgaaaaccttgttattgcccttcgccacgctggcattgtgcaccaacgcttttgccgccccgcccagcgacgcgtcgttggcgcgttggctggatacgcagaattttgaccgggatatagaaaaaaatatgattgagggctttaatgccggatttaaaccgtatgcggacaaagcccttgccgaaatgccggaagcgaaaaaagatcaggcggcagaagcctttaaccgttatcgtgagaatgttttgaaagatttgattacgcccgaagtgaaacaggctgtccgtaatactttattgaagaatgcccgtgagatatacacgcaagaagaaattgacggcatgattgccttttacggttcgcctgtcggtcagtccgtcgttgccaaaaatccgcgcttaatcaagaaatcgatgagtgaaatagcagtatcttggactgcattgtcagggaaaatcgcgcgacatcatctgcccgcgtttacggaagagttgcggcgcatcatctgcggtggtaaaaatcccgatgcgggctgtaaacaagccggacaggttgggaaaaggcatcagaaataa

SEQ ID NO: 71196 - DNA, 870 bp, Neisseria meningitidis
atgaagcgcatctttttgcccgccttgcccgccatcctgcctttatccgcttatgccgacctgcccttgacgattgaagacataatgactgacaagggcaaatggaaactggaaacttcccttacctacctgaatagcgaaaacaaccgcgccgaacttgccacaccggtttacatccaaaccggcgcaacctcgtttatccccattccgaccgaaatccaagaaaacggcagcaataccgatatgctcgttggcacgctcggtttgcgctacggactgaccgggaataccgacatttacggcagcggcagctatctgtggcacgaagaacgcaaactcgacggcaacagcaaaacccgcaacaaacggatgtccgacgtatccctcggcatcagccacaccttccttaaagacgacaaaaaccccgccctaatcagctttcttgaaagcacggtttacgaaaaatcgcgcaacaaagcctcgtcgggaaaatcctggctcatcggcgccaccacctacaaagccatagatccgattgtcctttccctcaccgccgcctaccgcatcaacggcagcaaaaccctttcagacggcatccgctacaaatcgggcaactacctgctgctcaaccccaacatctcatttgccgccaacgacagaatcagcctgaccggaggcatccaatggttgggcaggcagcccgaccggacggacggcaaacgggaatcctccagaaacacatccacctatgcccatttcggcgcaggtttcggtttcaccaaaaccacggctttaaacgcatccgcacgtttcaacgtttcagggcaaagcagttccgaactgaaatttggcgtacagcatacattttaa

SEQ ID NO: 71197 - DNA, 372 bp, Neisseria meningitidis
atgagaaaaccccaacgcggctatgcccgccaagaccgtgtcaaagaacaaattatgcgcgagcttgccgaactcgtccgtaccggactgaaagacccccgcgccggcttcatcaccgtcaacgaggtcgaagttacccgcgattacagccacgccaccgtgttctacaccgttttaaaccaagatgcgcgcgaaattacggaagaagtgctggaacacgcacgcggacacctccgcagcgaattggccaaacgcatcaaactgttcaaaatccccgaactccatttcaaatacgacgaatcgttggaacgcggtttgaacctgtccgcccttatcgatcaagtagcggcggaaaaaccggttgaagactga

SEQ ID NO: 71198 - DNA, 726 bp, Neisseria meningitidis; identical to SEQ ID NO: 55384

SEQ ID NO: 71199 - DNA, 1008 bp, Neisseria meningitidis
atgagcaccttcttccaacaaaccgcccaagccatgattgccaaacacatcgaccgtttcccgctattgaagttggaccaggtgattgattggcagccgatcgaacagtacctgaaccgtcaaaaaacccgttaccttagagaccaccgcggccgtcccgcctgtcccctgttgtccatgttcaaagccgtcctgctcggacaatggcacagcctctccgatcccgaactcgaacacagcctcatcacccgcatcgatttcaacctgttttgccgttttgacgaactaagcatccccgattacagcaccttatgccgctaccgcaattggctggctcaagacaataccctgtccgaattgctcaaactgatcaaccgacaactgaccgaaaaaggcctaaaagtagagaaagcatccgccgccgttgttgacgccaccattattcagaccgccgacagcaaacagcgccaggctatagaagtcgatgaagaaggacaaatcaacggccaaaccacaccgagtaaggacagcgatgcccgttggataaagaaaaacggcctctacaaactcggttacaaacaacatacccgtaccgatgcggaaggctatatcgagaaactgcacatcacccccgccaatgcccatgagtgcaaacacctgtcgcctttgctggaaggactgcccaaaggtacgaccgtctatgccgacaaaggctacgacagtgcggaaaaccggcaacatctggaagaacatcagttgttagacggcattatgcgcaaagcctgccgcaaccggccgctgtcggaagtgcaaaccaaacgtaaccgatatttgtcgaagacccgttatgtggtcgaacagagcttcggtacgctgcaccgtaaattccgctatgcgcgggcagcctatttcgggctgctcaaagtgagtgcgcaaagccacctgaaggcgatgtgtttgaacctgttgaaagccgccaacaggctaagtgcgcccgctgccgcctaa

SEQ ID NO: 71200 - DNA, 3234 bp, Neisseria meningitidis
atgaaaaaccaagtacgcggatcaggcatggatgcacgatccaatccggccaatgtttcagacggcctgcaaaacagttcgagccatatcggtaccaacacgcgctaccgcctgaccaagctcggcgaacaaatggcgcgcctgcccatcgacccgaaaatcgcgcgcattttgctggcggcgaagaaacacgactgtatggcggaaatattggtgattgcgtccgcgctgtcgattcaagacccgcgcgagcggccgttggaagcgcgcgatgctgcctccaaggcacacgaacgttttaccgacaagcagtccgatttccttgcctatctgaacatttgggacagcttccagcgtgagcgcgacaaaggtttgtccaacaagcagctggtgcagtggtgccgccaatatttcttgtcgcacctgcggatgcgcgaatggcgcgagctacaccaccagcttgcccaaactgcgattgaaatgggtttgaccaccaaagaagccgctttcagacgttctcccgaagtcaggcagctcacgtcgtctgaaaatgcaggcgaccaagacctatccgccaaactcaaacaaaaacaactggataagaaacaacaccgcgcccaaatccgcgctgccaaagaagcgggctacgaacaaatccaccgcgccctgctcaccggcctcatcgccaacgtcggcatgaaatcacccgacggcaacgactacaccagcacgcgcggcagccgcttccaccttttccccgcctccgccctgttcaaggcgaagcccaaatgggtgatggcggcagaactcgttgaaacgacaaaactttatgcccgcgacgtagccgccatccagcccgaatggatcgagcaggaagcgccgcacctcgtccgctaccactatttcgagccgcattgggaacaaaaacgcggcgaagtcatcgccagcgaacgggtaacgctctacggcctgaccgtcctgccgcgccgccccgtgtcctacggcagaatcgcccccgaagaagcgcgcgaaatctttatccgcggcgcattggtggcacaggaatgcgatttgaaagcggacttttttgtccacaacaaaaagctgattaaagaaattaccgaactcgaacacaaatcgcgcaagcaagacgtgctggtcgatgacgaagccctgtttgcgttttataacgaacgactgcccgaaatggcttggaaagacgcgcaaggcagcgtttggggaagtgaagattccgtacggattattgaatctgacaaagccgagaggtcgtctgaaaatgagcgcaacgagtttcgtaaaaacaagcgtaatgggtctcgccaaaatgaaaatcacggcaacaccgtaggttgggttgaaaacccaacatcagccgcaactgcaaaaactgttgggtttgacaacccaacctacgctactcagcaacccaccccctcccccgagagggagggtcggggagagggcaaaacagttgccgcacaaaccaacttttccgcaaccgcagcaaaccctctcccgcaggagagggaacagagtgcctcagcttcaacgttttcagacgacctgcgtcctgcaaatctgcagcaaaccgccccctcccccgtgggggagggctggggagagagcaaaacagttgccacccaaaccaacttttccgcaacctcaacactttcagacgaccccaaacccaaaaagcagcctgcacctcaaaaaggccgtctgaaacccctacccctcgccgacatccgcaccttccaagcctggctcaaaaccgccgagtgcgacaatccgcgcctgctgttcctcagccgcgacgatctgatgcaacacgccgccgcacacattaccgaagaacagttccccaaattctggcaaaccgcagacggcaaattcaaactttcctaccgcttcgagccgcaccatccgctagacggcgtgaccatgaccgtgccgctgaccgtcctcaaccgcctgcacgcgccatcgctcgaatggctggtgcccggtatgttgcgcgaaaaaatccagctgctgattaaagcactgccgaagcaaatccgccgcatttgtgtgcccgtacccgatttcatcaccaaattcctcgaaagcaatcccgaccgccaagcgaccatcattccccagttggcgcactttatcgccaaaagcgccagcgatatgcggattctcgagcaaatcgaccaagacgcatgggcggcgcaagaattgcccgaacactgctatctgaatctgcgcattatcgacgacggcggacaagagcttgccggcggccgcaaactgcacgaattgcaacaacagctcggccaagccgccgccgtcaccttccgcgacaacacccaagaattcgagcgcgacaacgttaccacatgggacatcggcaccctacccgaatccatcaaattcgcccgcggcaaacaacagctcaccggctacctcggcctgcaaaaagaaaaagacggccgcatcgccctgcgcctgtttgacaccaccgaagccgccgaacaggcacaccgtcaaggcgtcatcgaattgatgaagctgcaattaaaagagcaggtaaaagacctgaacaaaggcatccaaggcttcacccaagccgccatgctgctcaaacacatcaacgccgacaccctgcgcgacgacctcacccaagccgtctgcgaccgcgcctttatcggcgaagacgagctgccgcgcaacgaaaaagccttcaaagaacaaatcaaacgcgcccgcagccgcctgcccgccgtcaaagaagcccttagccgctacctgcaggaaaccgccgccgcctacgccgaactgaacggcaaactcggcaaacacccgctcacccacctcctaagactacgcctgcaaaccctgctcgccgccggcttcgccacccgcaccccgtgggcacaatggccgcgcctccccatctacctcaaagccatgaccttgcgcctcgaaaaatacagcagcaaccccgcccgcgacgcagcccgcgaagccgatatacaggaattggaacaaatgtggcaggaaaaaaccgacggcttggtgaaacaaggactacccgtttcagacgacctaaccgcgtttagatggatgattgaagaattgagagtgtcactgttcgcacaggaattgaagacaccgtatccagtgtcggtgaagaggttgttgaaagagtgggagaaaattttttaa

SEQ ID NO: 71201 - DNA, 942 bp, Neisseria meningitidis
atgaaaaccctgctcctcctcatccccctcgtcctaaccgcctgcggcacactgacaggcatacccgcccacggcggcggcaaacgctttgccgtagaacaagaactcgtcgccgcatcgtcccgcgccgccgtcaaagaaatggatttgtccgccctgaaaggacgcaaagccgccctttacgtctccgttatgggcgaccaaggttcgggcaacataagcggcggacgctactctatcgacgcactgatacgcggcggctaccacaacaaccccgaaagtgccacccaatacagctaccccgcctacgacactaccgccaccaccaaagccgacgcgctctccagcgtaaccacttccacatcgcttttgaacgcccccgccgccgccctgacgaaaaacagcggacgcaaaggcgaacgctccgccggactgtccgtcaacggcacgggcgactaccgcaacgaaaccctgctcgccaacccccgcgacgtttccttcctgaccaacctcatccaaaccgtcttctacctgcgcggcatcgaagtcgtaccgcccgaatacgccgacaccgacgtattcgtaaccgtcgacgtattcggcaccgtccgcagccgtaccgaactgcacctctacaacgccgaaacccttaaagcccaaaccaagctcgaatatttcgccgtcgaccgcgacagccggaaactgctgattgcccctaaaaccgccgcctacgaatcccaataccaagaacaatacgccctttggaccggcccttacaaagtcagcaaaaccgtcaaagcctcagaccgcctgatggtcgatttctccgacatcaccccctacggtgacacaaccgcccaaaaccgtcccgacttcaaacaaaacaacggtaaaaaccccgatgtcggcaacgaagtcatccgccgccgcaaaggaggataa

SEQ ID NO: 71202 - DNA, 969 bp, Neisseria meningitidis; identical to SEQ ID NO: 47252

SEQ ID NO: 71203 - DNA, 645 bp, Neisseria meningitidis; identical to SEQ ID NO: 43086

SEQ ID NO: 71204 - DNA, 408 bp, Neisseria meningitidis; identical to SEQ ID NO: 55717

SEQ ID NO: 71205 - DNA, 471 bp, Neisseria meningitidis; identical to SEQ ID NO: 55860

SEQ ID NO: 71206 - DNA, 729 bp, Neisseria meningitidis; identical to SEQ ID NO: 61032

SEQ ID NO: 71207 - DNA, 942 bp, Neisseria meningitidis; identical to SEQ ID NO: 60777

SEQ ID NO: 71208 - DNA, 504 bp, Neisseria meningitidis; identical to SEQ ID NO: 60590

SEQ ID NO: 71209 - DNA, 1578 bp, Neisseria meningitidis
atgcgcgccaaccccaaaacacaggcaatgccgtctgaaaccatatccctgatgaaaacacgcagcctaatttcccttttatgcctccttctctgttcatgttcttcatggttgcccccactggaagaacggacggaaagccgtcatttcaatacttccaaacccgtccgcctggacaacatcctgcaaatccggcacacccctcataccaacgggctatccgatatctatctgctgaacgacccccacgaagcctttgccgcccgcgccgcccttatcgaatctgccgaacacagcctcgatttgcaatactacatctggcgcaacgacatttccggccgactgctgttcaacctcgtgtaccttgccgcagaacgcggtgtgcgcgtacgcctgctgttggacgacaacaacacgcgcggattggacgacctcctgctcgccctcgacagccatcccaatatcgaagtgcgcctgttcaaccccttcgtcttacgaaaatggcgcgcactcggctacctgaccgacttcccccgcctcaaccgccgcatgcacaacaaatcctttaccgccgacaaccgcgccaccatactcggcggacgcaatatcggcgacgaatacttcaaagtcggtgaggacaccgttttcgccgacctggacatcctcgccaccggcagcgtcgtcggcgaagtatcgcacgacttcgaccgctactgggcaagccattccgcccacaacgccacgcgcatcatccgcagcggcaacatcggcaagggtcttcaagcactcggatacaacgacgaaacgtccagacacgcgctcctgcgctaccgcgaaaccgtcgaacagtcgcccctctaccaaaaaatacagacaggacgcatcgactggcagagcgtccaaacccgcctcatcagcgacgaccctgcaaaaggactcgaccgcgaccgccgcaaaccgccgattgccgggcggctgcaagacgcgctcaaacagcccgaaaaaagcgtctatctggtttcaccctatttcgtccccacaaaatccggcacagacgcactggcaaaactggtgcaggacggcatagacgttaccgtcctgaccaactcgctacaggcgaccgacgttgccgccgtccattccggctatgtcaaataccgaaaaccgctgctcaaagccggcatcaaactctacgagctgcaacccaaccatgccgtccctgccacaaaagacaaaggcctgaccggcagctccgtaaccagcctgcatgccaaaaccttcattgtggacggcaaacgcatcttcatcggctcattcaacctcgacccccgttccgcacggctcaatactgaaatgggcgttgttatcgaaagccccaaaatcgcagaacagatggagcgcacccttgccgataccacacccgaatacgcctaccgcgttaccctcgacaggcacaaccgcctgcaatggcacgatcccgccacccgaaaaacctacccgaacgaacccgaagccaaactttggaaacgcatcgccgcaaaaatcctatccctgctgcccatagaaagtttattatag

SEQ ID NO: 71210 - DNA, 420 bp, Neisseria meningitidis; identical to SEQ ID NO: 42190

SEQ ID NO: 71211 - DNA, 576 bp, Neisseria meningitidis
atgaaagaaaaaagtacagaaagaactgctccgttttttgtgctggaagttaccgcccgttctgccgccgatattttgggtatccatcccaattcggcagcactgttctaccgtaaaatccgcacggttatcaaccatcatttggccttggctgccgatgaggtttttgagggccctgtcgagccggacgaaagcgatttcggcggacggcgtaaaggcagacgtggtcgcggtgcggcaggaaaagtggttgtcttcggcattctgaaacgcaacggacgggtctataccgttgtggtggataatgccaagtctgaaacgttactccctgtcatcaagaagaaaatcatgccggacagcattgtttataccgatagtctgagcagctgcgacaagttggacgtgagcggttttatccattaccgcatcaaccattccaaggagtttgcagaccgtcagaaccacattaacggcattgagaatttttggaatcaggcaaaacgcgtcttgcgaaaatatagtggattggcacgaacgtttccccgaattggaagcgcaactgggtgcgccgattga

SEQ ID NO: 71212 - DNA, 855 bp, Neisseria meningitidis; identical to SEQ ID NO: 60909

SEQ ID NO: 71213 - DNA, 663 bp, Neisseria meningitidis; identical to SEQ ID NO: 38761

SEQ ID NO: 71214 - DNA, 498 bp, Neisseria meningitidis; identical to SEQ ID NO: 56033

SEQ ID NO: 71215 - DNA, 303 bp, Neisseria meningitidis; identical to SEQ ID NO: 37654

SEQ ID NO: 71216 - DNA, 366 bp, Neisseria meningitidis; identical to SEQ ID NO: 37248

SEQ ID NO: 71217 - DNA, 207 bp, Neisseria meningitidis; identical to SEQ ID NO: 55670

SEQ ID NO: 71218 - DNA, 1008 bp, Neisseria meningitidis; identical to SEQ ID NO: 55419

SEQ ID NO: 71219 - DNA, 294 bp, Neisseria meningitidis; identical to SEQ ID NO: 36355

SEQ ID NO: 71220 - DNA, 1296 bp, Neisseria meningitidis
atgagcgtcatccaagacctgcaatcgcgcggccttatcgcgcaaaccaccgacatcgaagccttagacgctttgttgaacgaacaaaaaatttccctttattgcggcttcgacccgaccgccgacagcctgcacatcggacacctgctgcccgtattggcattgcgccgcttccaacaggcggggcatacgccgattgcactggtgggcggtgcgaccggtatgatcggcgaccccagcttcaaagccgccgaacgcagcttgaattccgccgaaaccgttgccggctgggtggaaagcatccgcagccaattaacccctttcttgagctttgaaggcggaaacgccgccattatggcgaacaacgccgactggttcggcaaaatgaactgcctcgacttcctgcgcgacatcggcaagcatttctccgtcaacgccatgctgaacaaagaatccgtcaaacagcgcattgaccgcgacggcgcaggcatttccttcaccgagttcgcctactccctgctgcaaggctacgacttcgccgagttgaacaaacgccacggcgcggttttggaaatcggcggctccgaccaatggggcaacatcaccgccggtatcgacctgacccgccgcctgaatcaaaaacaagtgttcggcctgaccctgcctttggttaccaaatcagacggcaccaaattcggcaaaaccgaaggcggcgcagtatggctgaacgcgaaaaaaacctcgccctatcagttctaccaattctggctgaaagtcgccgatgccgatgtgtataaattcctgaaatactttaccttcctgtccatcgaagaaatcgatgccgtcgaagccaaagaccaggcaagcggcagcaagcccgaagcgcaacgcatcctcgccgaagaaatgacccgcctgattcacggcgaagaagcccttgccgccgcgcagcgcatttccgaaagcctgtttgccgaagaccaaagcagcctgaccgaaagcgacttcgagcagctcgccctcgacggcctgcctgcatttgaagtttcagacggcatcaatgtcgtcgaagccttggtcaaaaccggtttggcatcctccaataaagaagcgcgcggctttgtgaacagcaaagcggttttgctcaacggcaaacctgccgaagccaacaaccccaaccacgccgccgaacgccccgacgatgcctgcctgctgaccgacgaacacaaacgtttcggcaaatacaccatccttcggcgcggcaaacgcaatcacgcgcttttggtttggaaataa

SEQ ID NO: 71221 - DNA, 780 bp, Neisseria meningitidis
  misc_feature 4, 5, 6, 7, 8: 'n' is a, c, g or t
gtgnnnnntttggcactgagtgcctgtgccactcaaggtacggtcgataaagatgctcagattacccaagattggagtgtggagaagctctatgccgaagcccaggacgaattgaacagcagcaattatacgcgggctgtcaagttatacgaaatcttggaatcgcgcttccccaccagccgccatgcccggcaatcccaactggataccgcatacgcctattataaagacgatgaaaaagacaaggctctggcggcaatcgaacgcttccgccgcctccatccgcagcatccgaatatggattacgcgctgtatctgcgcggcttggtgctgttcaacgaagaccagtccttcttgaacaaactggcctcgcaagactggtccgaccgcgacccgaaagccaaccgcgaagcgtatcaggcctttgcggaactcgtccaacgcttcccgaacagcaaatacgccgccgatgcaaccgcacgcatggtcaaactggtcgatgcactgggcggcaatgaaatgtcggtggcgcgttactacatgaaacgcggcgcatatatcgccgccgccaaccgcgcccaaaaaattatcggcagctatcaaaatacacgctatgtcgaagaatcgctcgccatattggaacttgcctaccaaaaactcggcaaaccgcagcttgccgccgatacgcgccgcgtgttggaaaccaacttcccgaaaagcccgtttttgacgcacgcctggcagcccgacgatatgccctggtggcgttactggcattaa

SEQ ID NO: 71222 - DNA, 201 bp, Neisseria meningitidis; identical to SEQ ID NO: 37363

SEQ ID NO: 71223 - DNA, 846 bp, Neisseria meningitidis; identical to SEQ ID NO: 55616

SEQ ID NO: 71224 - DNA, 1152 bp, Neisseria meningitidis; identical to SEQ ID NO: 46888

SEQ ID NO: 71225 - DNA, 1935 bp, Neisseria meningitidis
atgagcttgatcgaatgtaaaaacatcaaccgctatttcggcagcggcgagaaccgcgtccatattttgaaagacatcagcctgtcgatagagaagggcgattttgtcgccatcatcgggcagtccggttcgggaaagtccacgctgatgaacatcctcggctgtttggataccgccggttccggttcgtaccgaatcgacggcatcgaaactgccaaaatgcagcctgacgagctggcggcattgcgccgcgaacgcttcggtttcatcttccaacgctacaacctcttaagctcgctgaccgcaagggataacgtcgcgctgccagccgtctatatgggcgcgggcggcaaagagcgttccgcgcgggcggagaagttgttacaggatttgggtttggcaagcaaagagggcaacaagcccggcgaactctcgggcggacagcagcagcgcgtctccatcgcccgcgccctgatgaacggcggagaaatcatcttcgccgacgagccgaccggcgcactcgataccgccagcggcaaaaacgtgatggaaatcatccgcaggctgcacgaagccgggcataccgtcattatggtcacgcacgaccccggcatcgccgccaatgccaaccgcgtcatcgaaatccgggacggcgaaatcatttccgacacctcgaaaaatccagaaatccccgcaagcaatgtcgggaggattcaggaaaaagcctcgtggtcgttttattacgaccagtttgtcgaagccttcagaatgtcggtgcaagcagtattggcgcacaaaatgcgttcgcttctgacgatgctcggcatcatcatcggtatcgcttcggttgtctccgtcgtcgcattgggcaatggttcgcagaaaaaaatccttgaagacatcagttcgatagggacgaacaccatcagcatcttcccggggcgcggcttcggcgacaggcgcagcggcaggattaaaaccctgaccatagacgacgcaaaaatcatcgccaaacaaagctacgttgcttccgccacgcccatgacttcgagcggcggcacgctgacttaccgcaataccgacctgaccgcttctttgtacggcgtgggcgaacaatatttcgacgtgcgcggactgaagctggaaacggggcggctgtttgacgaaaacgatgtgaaagaagacgcgcaggtcgtcgtcatcgaccaaaatgtcaaagacaaactctttgcggactcggatccgttgggtaaaaccattttgttcaggaaacgccccttgaccgtcatcggcgtgatgaaaaaagacgaaaacgctttcggcaattccgacgtgctgatgctttggtcgccctatacgacggtgatgcaccaaatcacaggcgagagccacaccaactccatcaccgtcaaaatcaaagacaatgccaatacccaggttgccgaaaaagggctgaccgatctgctcaaagcgcggcacggcacggaagatttcttcatgaacaacagcgacagcatcaggcagatagtcgaaagcaccaccggtacgatgaagctgctgatttcctccatcgccctgatttcattggtagtcggcggcatcggcgtgatgaacatcatgctggtgtccgttaccgagcgcaccaaagaaatcggcatacggatggcaatcggcgcgcggcgcggcaatatcttgcagcagtttttgattgaggcggtgttaatctgcgtcatcggcggtttggtcggcgtgggtttgtccgccgccgtcagcctcgtgttcaatcattttgtaaccgacttcccgatggacatttcggcggcatccgttatcggggcggtcgcctgttcgaccggaatcggcatcgcgttcggctttatgcctgccaataaagcagccaaactcaatccgatagacgcattggcgcaggattga

SEQ ID NO: 71226 - DNA, 1428 bp, Neisseria meningitidis
atgatacacaccgaaccgagcgcgcagccgtcaactatggacacggctgcttttttaaagcacatcgaatccgcattccgccgcattttttcagacggtatcgacctgatgcgatacctgcccgaagacaaatggcttgccttgaagcaggcgggtttgctgttgcccttcctcgacaaaaaatacggcgggcgcaagggcagccagtttgaaatccaagaagtcctgcggattgcggggcattacggcgtgcccgttacgctgcgtaccggcatcgaaggcgcgctggtgttgcagcctctgcaagagttcggcggcgaagcgcaagtcgcgcaaggtttggagatgattttcaaaggcgagggcggtggtttgggcgttaccgaacccgaaacctccggcgcggcgattgcccgagaaatgcagtcttactacgaatataccgacggacaaaccatttacgtcaacgccgcgaaatactggcagggcaactcgcaaagcgacttcctcctcgttgccgccaaagaacgcaaaaacggcaaactcgccaaagtcatcgacctgctgctcgtccccaaaacatacatccgctgcgaaaccctcgcatccgaaggcttgcgcgccgtccgttacgccgtcaaccgcatcgatgccgaaatgcctgcaaccgccgtgatgaaactctcccagagcgacgctgccggtttgcgcgcgttccaaaacatctttatccgcagccgcctgcaactgatcggcatgacgcacggcattatggaatacatccttgaaaacctggaacgatacgttcgcaacgacatcagattcgtcgattacgaacgccgcgaaatccggcgccgccatcaggtttccgagattctttaccgctacgtctgccattccgtttcgcctgttgcccccgtcgcccatcagctgatggaggcgaacatcgtcaaaaccctcgctacggaatacacttacgccgccgcgcaaatgttgcaaaaactcttgggcgcgaagggttttgaacgcggacacaccgccggcaatatcgccatcgacatccgccccttcacgatttttgaaggcccgaacgatatgctttatgccgaaatttacgaccagttcgttcgcgccaccgccgaagaaaaagaagcaggcattaagttggacaaaaaccaaaccctgctcgaccgcctgcaaaccgatgcccgctttgccgccgtcgcccgcgactacactttgcccgaagacatccgcagcttcctgcaggaacacaccctgaccgacgcctgcgccctgcaaaaagtcttcatcggcaaaatcatcgcccgactctttgtcttcgtacaggcggaacacgaagacaccgcagccttcctgctgaacgacatccgcaaagatatattggactgccgatattgcggatag

SEQ ID NO: 71227 - DNA, 570 bp, Neisseria meningitidis; identical to SEQ ID NO: 50699

SEQ ID NO: 71228 - DNA, 534 bp, Neisseria meningitidis
atgtttccccccgacaaaacccttttcctctgtctcagcgcactgctcctcgcctcatgcggcacgacctccggcaaacaccgccaaccgaaacccaaacagacagtccggcaaatccaagccgtccgcatcagccacatcgaccgcacacaaggctcgcaggaactcatgctccacagcctcggactcatcggcacgccctacaaatggggcggcagcagcaccgcaaccggcttcgattgcagcggcatgattcaattcgtttacaaaaacgccctcaacgtcaagctgccgcgcaccgcccgcgacatggcggcggcaagccgcaaaatccccgacagccgccttaaggccggcgacctcgtattcttcaacaccggcggcgcacaccgctactcacacgtcggactctatatcggcaacggcgaattcatccatgcccccagcagcggcaaaaccatcaaaaccgaaaaactctccacaccgttttacgccaaaaactacctcggcgcacatactttctttacagaatga

SEQ ID NO: 71229 - DNA, 1305 bp, Neisseria meningitidis; identical to SEQ ID NO: 54730

SEQ ID NO: 71230 - DNA, 1032 bp, Neisseria meningitidis; identical to SEQ ID NO: 55370

SEQ ID NO: 71231 - DNA, 324 bp, Neisseria meningitidis; identical to SEQ ID NO: 38702

SEQ ID NO: 71232 - DNA, 279 bp, Neisseria meningitidis; identical to SEQ ID NO: 54981

SEQ ID NO: 71233 - DNA, 408 bp, Neisseria meningitidis; identical to SEQ ID NO: 54784

SEQ ID NO: 71234 - DNA, 1647 bp, Neisseria meningitidis
atgaaacaccttcacgacttacccgcatggtcgaaattgtggaaccactttgacgacagcaaaacattgcatatgcgcgaaatgttcgagcaagacccgcagcgtgcggaacgctactggctgcaagtcggcggactgacgctggactactccaaaaaccgcatcaacgacgaaaccatgtcgcttttgttcgagcttgcccgagaagcaggcgtgccggagcggatgcggcagatgttccacggcgaaaaaatcaataccaccgaaaaccgcgccgtcctgcatgtcgcccttcgcaaccgcaccaattcgccgattgtggttgacggtgaagatgtgatgcccaaagtcaaccgcgttttgcaacgtatgggcgaatttgcacacgaagtccgcagcggaagctggctgggctataccaaccaagtcattaccgacgttgtcaacatcggcatcggcggatcggatttgggcccgctgatgatgtgtaccgcgctcaaacctttcggtcatccgcgcctcaatatgcacttcgtctccaacgtggacggctcgcaactgcgcgacgtattgtccaaagtccaccccgaaaccacgctgttcatcatcgcctccaaaacatttaccacgcaggaaacgctgaccaacgcgctgaccgcgcgcgaatggtttttgaatcatgcgggcgacgaagaagccgttgccaaacacttcgccgccgtttccaccaatcaaaaagccgtcgccgaattcggcatcgacaccgccaatatgtttgaattttgggattgggtcggcggtcggtacagcctgtggtccgccatcggattgccgattatgctgtatctcggcgaagaaaacttcattgaaatgctcaacggcgcgcacctgatggaccaacacttcatcaacacaccgctcgagcgcaacctgcccgtcattctcgccctcatcggcatctggtatatcaactactacggcggcggcagccacgtcatcgcgccttacgaccaacatttgcaccgcctgcccaaattcatccagcagctcgatatggaaagcaacggcaaacaggttacgttggacggcaaagcagtcggacacgaaacctcgccgattatctggggcgaaacgggcattaacggccagcacgccttcttccaactgctgcaccaaggcacgcacattacccccatcgacctgattgcctcgcttgaaaaacgcagcaacctgcccggacaccacgaaatcctgcttgccaacgtcttcgcccaagcagaagcctttatgcgcggcaaaacccccgacgaagtccgtgccgaactcaaagcgcagggtatggatgaggcgcgcatcgaagagctggtcccgcacaaaaccttctccggcaaccgcccgaccaacctcattctcatggacaaggtcaacccgcgcaatatgggcagcctgattgccatgtacgaacacaaaaccttcgtacaaggcatcatttggggcatcaacagcttcgaccagtggggcgtggaactcggcaaacaactggctaaaaccattttgggcgaactgaccggcgaaaccgggccgcaaaagcacgacagttcgaccgaacgcctgatcaacctctacctgcagaccaaccgcaaataa

SEQ ID NO: 71235 - DNA, 759 bp, Neisseria meningitidis; identical to SEQ ID NO: 37775

SEQ ID NO: 71236 - DNA, 1719 bp, Neisseria meningitidis
ttgttggttatcctggctgtcataccccttaaaaccttagctgccgatgaaaacgatgcagaacttatccgttccatgcagcgtcagcagcacatagatgctgaattgttaactgatgcaaatgtccgtttcgagcaaccattggagaagaacaattatgtcctgagtgaagatgaaacaccgtgtactcgggtaaattacattagtttagatgataagacggtgcgcaaattttcttttcttccttctgtgctcatgaaagaaacagcttttaaaactgggatgtgtttaggttccaataatttgagcaggctacaaaaagccgcgcaacagatactgatcgtgcgtggctacctcacttcccaagctattatccaaccacagaatatggattcgggaattctgaaattacgggtatcagcaggcgaaataggggatatccgctatgaagaaaaacgggatgggaagtctgccgaaggcagtattagtgcattcaataacaaatttcccttatataggaacaaaattctcaatcttcgcgatgtagagcagggcttggaaaacctgcgtcgtttgtcgagtgttaaaacagatattcagattataccgtccgaagaagaaggcaaaagcgatttacagatcaaatggcagcagaataaacccatacggttcagtatcggtatagatgatgcgggcggcaaaacgaccggcaaatatcaaggaaatgtcgctttatcgttcgataaccctttgggcttaagcgatttgttttatgtttcatatggacgcggtttggcgcacaaaacggacttgactgatgccaccggtacggaaactgcaagcggatccagaagttacagcgtgcattattcggtgcccgtaaaaaaatggctgttttcttttaatcacaatggacatcgttaccacgaagcaaccgaaggctattccgtcaattacgattacaacggcaaacaatatcagagcagcttggccgccgagcgcatgctttggcgtaacagacttcataaaacttcagtcggaatgaaattatggacacgccaaacctataaatacatcgacgatgccgaaatcgaagtgcaacgccgccgctctgcaggctgggaagccgaattgcgccaccgtgcttacctcaaccgttggcagcttgacggcaagttgtcttacaaacgcgggaccggtatgcgccaaagtatgcccgcacctgaagaaaacggcggcggtactattccaggcacatcccgtatgaaaatcataaccgccggattggatgcagcggccccgtttatgttgggcaaacagcagtttttctacgcaaccgccattcaagctcaatggaacaaaacgcctttggttgcccaagacaagttgtctatcggcagccgctacaccgttcgcggatttgatggggagcagagtcttttcggagagcgaggtttctactggcagaatactttaacttggtattttcatccgaaccatcagttctatctcggtgcggactatggccgcgtatctggcgaaagtgcacaatatgtatcgggcaagcagctgatgggtgcagtggtcggcttcagaggagggcataaagtaggcggtatgtttgcttatgatctgtttgccggcaagccgcttcataaacccaaaggctttcagacgaccaacaccgtttacggcttcaacttgaattacagtttctaa

SEQ ID NO: 71237 - DNA, 2121 bp, Neisseria meningitidis
atgcgccgttttctaccgatcgcagccatatgcgccgtcgtcctgttgtacggactgacggcggcaaccggcagcaccagttcgctggcggattatttctggtggattgttgcgttcagcgcaatgctgctgctggtgttgtccgccgttttggcacgttatgtcatattgctgttgaaagacaggcgcgacggcgtattcggttcgcagattgccaaacgcctttccgggatgtttacgctggttgccgtactgcccggcgtgtttctgttcggcgtttccgcacagttcatcaacggcacgattaattcgtggttcggcaacgatacccacgaggcgcttgaacgcagcctcaatttgagcaagtccgcattgaatctggcggcagacaacgccctcggcaacgccgtccccgtgcagatagacctcatcggcgcggcttccctgcccggggatatgggcagggtgctggaacattacgccggcagcggttttgcccagcttgccctgtacaatgccgcaagcggcaaaatcgaaaaaagcatcaacccgcacaagctcgatcagccgtttccaggtaaggcgcgttgggaaaaaatccaacgggcgggttcggtcagggatttggaaagcataggcggcgtattgtacgcgcagggctggctgtcggcgggtacgcacaacgggcgcgattacgccttgtttttccgtcagccggttcccaaaggcgtggcagaggatgccgtcttaatcgaaaaggcaagggcgaaatatgctgagttgagttacagcaaaaaaggtttgcagacctttttcctggcaaccctgctgattgcctcgctgctgtcgatttttcttgcactggtcatggcactgtatttcgcccgccgtttcgtcgaacccgtcctatcgcttgccgagggggcgaaggcggtggcgcaaggcgatttcagccaaacccgtcctgttttacgcaatgacgagttcgggcgtttgaccaagttgttcaaccacatgaccgagcagctttccatcgccaaagaagcagacgagcgcaaccgccggcgcgaggaagccgccagacattatcttgaatgcgtgttggaggggctgaccacgggcgtggtggtgtttgacgaacaaggctgtctgaaaaccttcaacaaagcggcggaacagattttggggatgccgcttacccccctgtggggcagcagccggcacggttggcacggcgtttcggcgcagcagtccctgcttgccgaagtgtttgccgccatcggcgcagcggcaggtacggacaaaccggtccatgtgaaatatgccgcgccggacgatgccaaaatcctgctgggcaaggcaaccgtcctgcccgaagacaacggcaacggcgtggtaatggtgattgacgacatcaccgttttgatacacgcgcaaaaagaagccgcgtggggcgaagtggcaaaacggctggcacacgaaatccgcaatccgctcacgcccatccagctttccgccgaacgtctggcgtggaaattgggcgggaagctggatgagcaggatgcacaaatcctgacgcgttcgaccgacaccatcgtcaaacaggtggcggcattgaaggaaatggtcgaagcattccgcaattatgcgcgttccccttcgctcaaattggaaaatcaggatttgaacgccttaatcggcgatgtgttggcattgtatgaagccggtccgtgccggtttgcggcggagcttgccggcgaaccgctgatggtggcggcggatacgaccgccatgcggcaggtgctgcacaatattttcaaaaatgccgccgaagcggcggaagaagccgatgtacccgaagtcagggtaaaatcggaagtggggcgggacggtcggattgtcctgacggtttgcgacaacggcaaagggttcggcagggaaatgctgcacaacgccttcgagccgtatgtaacggacaaaccggcgggaacgggattgggtctgcccgtggtgaaaaaaatcattgaagaacacggcggccgcatcagcctgagcaatcaggatgcgggtggggcgtgtgtcagaatcatcttgccaaaaacggtaaaaacttatgcgtag

SEQ ID NO: 71238 - DNA, 1296 bp, Neisseria meningitidis
ttgtcaggagtcggcaaacttgcccgcttaggcgcgaaattaagcacaagggcagttccttatgtcggaacagcccttttagcccatgacgtatacgaaactttcaaagaagacatacaggcacaaggctaccaatacgaccccgaaaccgacaaatttgtaaaaggctacgaatatagtaattgcctttggtacgaagacgaaagacgtattaatagaacctatggctgctacggcgttgacagttccattatgcgccttatgtccgattacagcagattccccgaagtcaaagaattgatggaaagccaaatgtataggctggcacgtccgttttggaattggcataaagaagaactgaataaattaagttctttggattggaataattttgttttaaatcgttgcacatttgattggaacggcggagattgtgtggtcaataaaggtgatgattacagaaatggggctaatttttcccttagccgcaatccgaaatacaaagaagaaatggatgccaaaaagctggaagagattttatcgttgaaagtcgatgccaatcccgacaaatacataaaggcaaccggatatcccggttattccgaaaaagtagaagtagcacccggaacaaaagtgaatatggggcctgttacggacaggaacgggaatcccgttcaggttgtcgcaacattcggcagggattcgcaaggcaacaccacagtggatgttcaagtaatcccgcgtcccgacctcacacccggaagcgcggaagcaccgaacgcacagccgctgcccgaagtatcgcccgccgaaaaccccgcaaacaacccgaaccccaatgagaaccccggcacgagccccaatcccgaacccgaccccgatttgaatcccgatgcaaatcccgatacggacggacagcccggcacaagacccgattcccccgcagttccgggccgcacaaacggcagggacggcgaagacggcggccttttgtgcaaattcttccccgacattctcgcttgcgacaggctgcccgagcccaatccggcagaagatttaaatctgccgtctgaaaccgtcaatgtagagtttcagaaatcaggaatctttcaaaattccgcacagtgtcccgcacctgtcactttcacagtgactgtgcttgattccagcaggcagttcgcgttcagctttgagaacgcatgtaccatagccgaacggctaaggtacatgcttctcgcccttgcttgggcggttgccgcatttttctgtatccgcacagtatcccgtgaagtctag

SEQ ID NO: 71239 - DNA, 987 bp, Neisseria meningitidis; identical to SEQ ID NO: 37169

SEQ ID NO: 71240 - DNA, 195 bp, Neisseria meningitidis; identical to SEQ ID NO: 42490

SEQ ID NO: 71241 - DNA, 264 bp, Neisseria meningitidis; identical to SEQ ID NO: 60885

SEQ ID NO: 71242 - DNA, 228 bp, Neisseria meningitidis; identical to SEQ ID NO: 44482

SEQ ID NO: 71243 - DNA, 1218 bp, Neisseria meningitidis; identical to SEQ ID NO: 61112

SEQ ID NO: 71244 - DNA, 876 bp, Neisseria meningitidis
atgtttcagaaacatttgcagaaagcctccgacagcgtcgtcggagggacattatacgtggttgccacgcccatcggcaatttggcggacattaccctgcgcgctttggcggtattgcaaaaggcggacatcatctgtgccgaagatacgcgcgttaccgcgcagcttttgagcgcgtacggcattcagggccaactcgtcagcgtgcgcgaacacaacgaacggcagatggcggacaagattgtcggctatctttcagacggcatggttgtggcacaggtttccgatgcgggtacgccggccgtgtgcgacccgggcgcgaaactcgcccgccgcgtgcgtgaggtcgggtttaaagttgtccctgttgtcggcgcaagcgcggtgatggcggctttgagtgtggctggtgtggcgggatccgatttttatttcaacggttttgtaccgccgaaatcgggcgaacgtaggaaattgtttgccaaatgggtgcgggcggcgtttcctatcgtcatgtttgaaacgccgcaccgcatcggggcgacgcttgccgatatggtggaattgttccccgaacgccgattaatgctggcgcgcgaaattacgaaaacgtttgaaacgttcttaagcggcacggttggggaaattcagacggcattgtctgccgacggcaaccaatcgcgcggcgagatggtgttggtgctttatccggcgcaggatgaaaaacacgaaggcttgtccgagtccgcgcaaaacatcatgaaaatcctcacagccgagctgccgaccaaacaggcggcggagcttgccgccaaaatcacgggcgagggaaaaaaagctttgtacgatctggcactgtcttggaaaaacaaatga

SEQ ID NO: 71245 - DNA, 348 bp, Neisseria meningitidis; identical to SEQ ID NO: 55469

SEQ ID NO: 71246 - DNA, 411 bp, Neisseria meningitidis; identical to SEQ ID NO: 44723

SEQ ID NO: 71247 - DNA, 1260 bp, Neisseria meningitidis; identical to SEQ ID NO: 55040

SEQ ID NO: 71248 - DNA, 216 bp, Neisseria meningitidis
atgaaaaaaggaaggggcggaaaacctatgacaaatcattctatgttcccaaaagattgggatgaggctagaattagggctgaagttacttcggcttgggagaaaagaaaggaattagaaggtcaaaaatggagaggtacaagtaaatctggtgttgaaatagaaggatttacggaacctaatcgaacagcttatccactttataatagtaaatga

SEQ ID NO: 71249 - DNA, 7440 bp, Neisseria meningitidis
gtgaaatctgttccttttggtactactcatgcacctgtttgtcgttcaaatatcttttctttttctttattgggcttttctttatgtttggctgtaggtacggccaatattgcttttgctgatggcattattgctgataaagctgctcctaaaactcaacaagccacgattctgcaaacaggtaacggcataccgcaagtcaatattcaaacccctacttcggcaggggtttctgttaatcaatacgcccagtttgatgtgggtaatcgcggggcgattttaaacaacagccgcagcaacacccaaacacagctaggcggttggattcaaggtaatccttggttggcaaggggcgaagcacgtgtggttgtaaaccaaatcaacagcagccattcttcacaaatgaatggctatattgaagtgggcggacgacgtgcagaagtcgttattgccaatccggcagggattgcagtcaatggtggtggttttatcaatgcttcccgtgctactttgacgacaagccaaccgcaatatcaagcaggcgcattaacaggctttcaggttcgttcgggtcatgttgcgatcacgggacaaggtttggatgcccgtgataccgatttcacacgtattctcagttatcattccaaaattgatgcacccgtatggggacaagatgttcgtgtcgtcgcgggacaaaacgatgtggtcgcaacaggtaatgcacattcgcctattctcaataatgctgctgccaatacgtcaaacaatacagccaacaacggcacacatatccctttatttgcgattgatacaggcaaattaggaggtatgtatgccaacaaaatcaccttgatcagtacggccgagcaagcaggcattcgtaatcaagggcagttgtttgcttcttccggtaatgtggcgattgatgcaaatggccgtttagtcaatagtggcacgatggctgccgccaatgcgaaagatacggataatacagcggaacacaaagtcaatatccgcagtcagggcgttgaaaacagcggtacggcggtatcgcaacaaggcactcaaattcacagtcagtcgattcaaaacactggcacattattgtcctcaggcgaaatattgattcacaattcgggcagcctgaaaaatgaaacatcaggcaccattgaagccgctcgtttggctattgataccgacacacttaataatcaaggcaaactctctcaaacaggttcacaaaaactccatattgatgcacaaggcaaaatggataaccgtggccgcatgggtttacaagataccgcaccaaccgcgtcaaatggttcaagcaatcaaaccggcaatagttacaatgcatcttcccattcatccactaccacaccaacaacggcaacaggtacgggtactgcaaccgtttctatatcaaacataactgcgcctacctttgctgatgggacaattcgcactcatggtgcactggataattcaggcagtattattgccaatggtcaaacagatgttagtgcgcaacaaggtttaaataatgcaggacaaatagacattcatcagttaaatgcaaaaggttcggcgtttgacaatcacaatggaacaattatcagtgatgcggtccacattcaagccggcagcctgaataatcaaaatggcaacatcacaacacgccaacagttagagattgaaaccggtcaactggataacgctcatggcaagttattatcagcagaaatagcggatttagccgtttcaggcagcctgaacaaccaaaatggcgaaatagcgaccaatcaacaactgattattcacgatggtcaacaatctaccgctgccattgataatacgaatggcacgatacaatcaggccgtgatgttgctattcaggcaaaatcgttatccaacaacggcacacttgccgctgataataaactggatattgcgttacaagatgatttttatgtaggacgcaagatcgtggcgggcaatgaattgtcgctcagtacacgaggcagcctgaaaaattcacataccttgcaagcaggaaaacgcattcggattaaagcaaataaccttgataatgcagcacaaggcaacattcaatccggcggtacgacagacattggcacgcagcacaatttaaccaatagaggcttgattgacggacaacaaaccaaaatccaagccgggcaagtgaataatatcggtacaggtcggatttatggtgacaatatcgctattgcggctacccgcttagacaatcaagatgaaaacggtacaggtgccgccattgcggcacgcgaaaacctgaatttaggcattggacaattaaataaccgtgaaaacagtctgatttacagcggtaacgatatggcggttggcggcgcattagataccaatggccaagccacaggcaaagcccaaagcatacgcaatgccagtgccaccattgaagccgccggcaaaatgcgtttaggtgtagaaaagctgcacaataccaatgagcatttgaaaacgcagttggtagaaacagggcgcgagcatattgttgattacgaagcatttggacgacacgaattattgcgggaaggcacgcaacatgaattaggctggtctgtctataacgatgaatcagaccacttacgcacccctgatagagcggcgcatgaaaattggcataaatacgattatgaacaagtcacccaaaaaacccaagttacccaaactgcgccagccaaaatcatttcaggtaatgatttaaccattgatggtaaagaagtatttaataccgatagccaaatcatcgccggcggcaatttgcttgtgcaaacagaaaaagacggtttgcataacgagcaaacctttggcgaaaagaaagtattcagtgaaaatggcaaattacacagctattggcgtgagaaacataaaggacgagactcaacgggacatagcgaacaaaattacactttgccggaggaaatcacacgcaacatttcactgggttcatttgcctatgaatcgcatcgcaaagcattaagccatcatgcgcccagccaaggcactgagttgctgcaaagcaacggtatttcgctaccctatacgtccaattcttttaccccattacccagcagcagcttatacattatcaatcctgtcaataaaggctatcttgttgaaaccgatccacgctttgccaactaccgtcaatggttgggtagtgactatatgctggacagcctcaaactagacccaaacaatttacataaacgtttgggtgatggttattacgagcaacgtttaatcaatgaacagatcgcagagctgacagggcatcgtcgtttagacggttatcaaaacgacgaagaacaatttaaagccttaatggataatggcgcgactgcggcacgctccatgaatctcagcgttggcattgcattaagtgccgagcaagtagcgcaactgaccagcgatattgtttggttggtacaaaaagaagttaaacttcctgatggcggcacacaaaccgtattggtgccacaggtttatgtacgcgttaagaatggcgacatagacggtaaaggtgcattgttgtcaggcagcaatacacaaatcaatgtttcaggcagcctgaaaaactcaggcacgattgcagggcgcaatgcgcttattatcaataccgatacgctagacaatatcggtgggcgtattcatgcgcaaaaatcagcggttacggccacacaagacatcaataatattggcggcattctttctgccgaacagacattattactcaacgcaggcaacaacatcaacagccaaagcaccgccgctagcagtcaaaatacacaaggcagcagcacctacctagaccgaatagcaggtatttacatcacaggcacagaaaaaggtgttttagcagcacaagctggtaaggacatcaacatcattgccagtcaaatcagcaatcaatcagagcaaggacaaacccagctgcaagcagggcgcaacatcaatctggataccgtacaaaccggcaaacatcaagcaacccattttgatgccgataaccatgttattcgcggttcaacgaacgaagtcggcagcagcattcaaacaaaaggcgatgttgccctattgtcagggaataacctcaatgccaaagctgccgaagtcggcagcgcaaacggtacactcgctgtgtctgccaaaaatgacatcaacatcagcgcaggcatcaatacgacccatgttgatgatgcgtccaaacacaaaggcagaagtggcggtggcaataaattggttattaccgacaaagcccagagccacaatgaaaccgctcaaagcagcacctttgacggcaaacaagttgtattgcaggcaggaaacgacgccaacataaagggcagcaatgtcatttctgacaatggcacccatatccaagcaggcaatcatgttcacattggcacaaccctaacccataatcaaagcgaaacctatcatcaaaccaaaaaatcaggattgatgagcgcaggtatcggcttcacgattggcagcaagacaaacacacaagaaaaccaatcccaaagcaacgaacatacaggcagtaccgtaggcagcctgaaaggcgataccaccattgttgcaggcaaacactacgaacaaatcggcagtaccgtttccagcccggaaggcaacaataccatccatgcccaaagcatagacattcaagcggcacacaaccaattaaacagtaataccagccaaacctatgaacaaaaaggcttaacggtggcattcagttcgcccgttaccgatttggcacaacaagcgattgccgtcgcacaaagcggcaaacaagtcggacaaagcaaaaatggtcgtgtcaatgccatggcagctgccaatgcaggctggcaagcctatcaaacaggtaagagtgcacaaaacttagccaatggtacaaccaatgccaaacaagtcagcatctccataacctacggcgaacagcaaaaccgacaaaccacccaagttcaagccaatcaagcccaagcgagtcaaattcaagcaggtggtaaaaccacattaatcgccacaggcgcagcagaacaatccaatatcaacatcgcaggctcagatattgccggcaaagcaggcacaatcctgattgccgataatgacatcacactccaatcagccgagcaaagcaataccgaacgcagccaaaacaaatcatcaggttggaacgcaggtgctgccgtatcattcggacaaggaggctggtcattaggcgttaccgcaggcggcaatgtcggcaaaggccacggcaatggcgacagcgtaacacaccgccacagccatattggcgacaaaggcagccaaaccgttctccaaagcggcggcgataccgcactcaaaggcgcgcaagtcattggcaaaggcgtacaagttaatgcccaaaacttgcatattcaaagcgtacaagatagcgaaacctatcaaagcaaacaacaaaacgccagtgcacaagttaccgtaggttatggcttcagtgccggtggcgattacagccaaagcaaaatccgagccgaccatgtttcagtaaccgagcaaagcggtatttatgccggagaagacggctatcaaatcaaggtcggaaaccatacagacctcaaaggcggcatcatcaccagtacccaaagcgcagaagacaagggtaaaaaccgctttcagacggccaccctcacccatagcgacatcaaaaaccacagccaatacaaaggcgaaagttttggattgggcgcaagtgcgtccataagcggcaaaacactgggacagggcgcacaaaataagcctcaaaacaaacacctgacaagcgtagccgataaaaacggcgcaagttcatcagtgggttatggcagcgacagcgacagtcaaagcagcatcacgaaaagcggcatcaacacccaaaacattcaaatcaccgacgaagccgcacaaatcaggctgacaggcaaaacagcggcacaaaccaaagccgatattggtacaaacgtaaccacagacaccgccgaacgacattcgggcagcttgaagaacaccttcaacagagaagcggtgcaaaacgagctggatttgcaaagggaagtaacccaagagtttgataaaactagacaaggagtgaaacaagaactttatgcagtagtagatagcaaacgagcgcaagccacacaagagagactcaaaaatggtggatatgacaatgataaatctagagcattaaataaggaagctaatgaattagatgaaaaaattcgttggcttgatgcgggattaggactcgtttggggcgcagggagttctgatatggcttggagtatgtttgccacaacccaagccgatagagcggtaaggtctgcaactgcacctaaagaaatgtggttccataagaagataatagatgaaaaaacaggtaaagtatcctttgataccagacaaatttggtcattgaatgatttaagcaaggaagaactggcaagcattcaagacacaaatggcaaagttattactgtgtctaatcctggtattttcaataatcgagaagattcattaagcaacgcagcaaaacaaaatcgtaatagtacaaacggtagtggtgttattgcagttatgaatcctccaacagggaaatataaatctgattctaataacaaaataaaagattttttatggctcggttcaagtcttgtttctgaactgatgtatgtcggttacgaccaattaaataataaagtgttccaaggctatttacccaaaaccaattcagaaaaactgaatcaagatatttatcgagaggttcaaaaaatgggtaacggctggtcggttgataccagtaatcacagtcgtgggggaattacagcaagcgtttccttaaaagattgggtaaacaatcaaaaacaaaatggcattgccccaatcagaaaagcacgtttctatggtacagccacaaatgtgcagaatgattacgccgatgttttacagaaaaacggctatacctatacgggtgcagacggcaaaacttataacagcggatcctactcaatcgtgcatgataaagattttgtggggaacaaatggatacctttcttattaggaaccaatgacaccacacaaggtacatgtaaggggttttgttattcgcacagttcatattttgcggaagtgcctgaacagtataagcgagacaaaaatggaaattttgttactgataatgaagggaataaaattgaaacgaaagactgggacagttacacaaaaatatggggaattcctaaaaaaggtactgatggaaaagacataaatcacgctattcccaaattagtcaatccaaacaagccaaatggagaaaagtatgaagaaaatcctttctaa

SEQ ID NO: 71250 - DNA, 198 bp, Neisseria meningitidis; identical to SEQ ID NO: 61508

SEQ ID NO: 71251 - DNA, 312 bp, Neisseria meningitidis; identical to SEQ ID NO: 37456

SEQ ID NO: 71252 - DNA, 237 bp, Neisseria meningitidis
  misc_feature 214, 215, 216, 217, 218: 'n' is a, c, g or t
atgaccgacatcacaccgtttgccaaccgcttgggcaaaaacatcaaacactttatgaaatgggtgaaacgcaacggcatcgaagcctggcgcatttacgaccgcgacatcccccaattcccctttgccgccgatgtttacggcgatcgaatccaccttcaggaatacgataccggctggctgatgcggcccgaagaatacgaagcgtggcttnnnnncacacacttaattaattaa

SEQ ID NO: 71253 - DNA, 477 bp, Neisseria meningitidis; identical to SEQ ID NO: 55969

SEQ ID NO: 71254 - DNA, 645 bp, Neisseria meningitidis; identical to SEQ ID NO: 55790

SEQ ID NO: 71255 - DNA, 198 bp, Neisseria meningitidis; identical to SEQ ID NO: 63256

SEQ ID NO: 71256 - DNA, 4476 bp, Neisseria meningitidis; identical to SEQ ID NO: 55788

SEQ ID NO: 71257 - DNA, 132 bp, Neisseria meningitidis
atgtatatttatgatttttatttgccggaaggggaatatttatttgagatttctgataatagtgaatatattccactttacgatgaaataaataattctataagaatagtagttaatgcacgaattcagtaa

SEQ ID NO: 71258 - DNA, 444 bp, Neisseria meningitidis; identical to SEQ ID NO: 38644

SEQ ID NO: 71259 - DNA, 1008 bp, Neisseria meningitidis
atgagcaccttcttccaacaaaccgcccaagccatgattgccaaacacatcgaccgtttcccgctattgaagttggaccaggtgattgattggcagccgatcgaacagtacctgaaccgtcaaaaaacccgttaccttagagaccaccgcggccgtcccgcctgtcccctgttgtccatgttcaaagccgtcctgctcggacaatggcacagcctctccgatcccgaactcgaacacagcctcatcacccgcatcgatttcaacctgttttgccgttttgacgaactaagcatccccgattacagcaccttatgccgctaccgcaattggctggctcaagacaataccctgtccgaattgctcaaactgatcaaccgacaactgaccgaaaaaggcctaaaagtagagaaagcatccgccgccgttgttgacgccaccattattcagaccgccgacagcaaacagcgccaggctatagaagtcgatgaagaaggacaaatcaacggccaaaccacaccgagtaaggacagcgatgcccgttggataaagaaaaacggcctctacaaactcggttacaaacaacatacccgtaccgatgcggaaggctatatcgagaaactgcacatcacccccgccaatgcccatgagtgcaaacacctgtcgcctttgctggaaggactgcccaaaggtacgaccgtctatgccgacaaaggctacgacagtgcggaaaaccggcaacatctggaagaacatcagttgttagacggcattatgcgcaaagcctgccgcaaccggccgctgtcggaagtgcaaaccaaacgtaaccgatatttgtcgaagacccgttatgtggtcgaacagagcttcggtacgctgcaccgtaaattccgctatgcgcgggcagcctatttcgggctgattaaagtgagtgcgcaaagccatctgaaggcgatgtgtttgaacctgttgaaagccgccaacaggctaagtgcgcccgctgccgcctaa

SEQ ID NO: 71260 - DNA, 891 bp, Neisseria meningitidis
gtgtctgaaattcatcaaatttattgggaggaatcgggcaatcccgacggtgtgccggttatttttttacatggcgggccgggcgcgggggcttcgcctgaatgtcggggttttttcaatcccgatgtgttccgcatcgtcatcatcgaccagcgcggttgcggacgttcgcgcccgtatgcttgtgcggaagacaatacgacttgggatttggtggcggatattgaaaaagtccgtgaaatgctgggtatcaggaaatggctggtgttcggcggttcgtggggcagcactttgtcgctggcttatgcccaaacccatcctgaacgggtaaagggattggtattgcgcgggatatttttgtgcaggccgtctgaaacggcgtggctgaacgaggcgggcggtgtgagccggatttatccggaacaatggcaaaaatttgtcgcgccgattgctgaaaatcgacggaaccggctgattgaggcgtatcacgggttgctgtttcatcaagatgaagaagtgtgcctgtctgccgcaaaggcttgggcggattgggaaagctatctgatccgtttcgagccggaggaagtggatgaagatgcttatgcctcgctggcaatcgcgcgtttggaaaaccattattttgtcaacggcggctggttgcagggcgatagggcgattttgaacaatatcggcaaaatacggcatatcccgaccattatcgtgcaggggcggtatgatttgtgtacgccgatgcagagtgcgtgggcgctgtcgaaagcctttccggaagcggaattgagggtggttcaggcagggcatcgtgcgttcgatccgcctttggcggatgcgctggttcaggcggttgaggatattttgccccgtttgttgtaa

SEQ ID NO: 71261 - DNA, 972 bp, Neisseria meningitidis
atgacagaatatcccggcatcgggtcgccgttgttttacggcgttttttttgcggcagtgctggtcatgattgccttggatatgttttcgctgaagaaaaacggcagccataaagtcggcgtcaaagaagccttggcatggagcggcttgtgggttgccgtatcctgcctgttcgcgggctggctgtatttcgaactcgccggcaatcccggctacggcgcggcagtcgcaaaagaaaaagtattggaattctttaccggctacattttggaaaaatcgttggcagtcgacaatattttcgtgttcctgatgatattcggctacttcaaagtcgcaccgcagtttcagcaccgcgtgctgctgtacggcgtattgggcgcattggtattgcgcactgtcatgattttcgtcggcgcggcactggttcggcagtttgagtggattctgtatctgtttggcgcgttcctgctctatactggtatacacatgatgaagcccgaaggcgatgagaaagaggatttggcaaacagcaggctgctgaatgccgtaaagaaagtcgttccggtcggcacggaatttcacggcgagaaattttttaccgtcgaaaacggcaaaaaaatcgccacgccgctgtttttggtgctggtcatgattgaattgagcgatgtcgtgtttgccgtggacagcatccccgccgtctttgccgttaccaccgatccgtttatcgtgctgacttccaatattttcgcaattctgggcttgcgggcgatgtatttcctgctggcggatgtggcggaacgcttcgtattcctgaaatacggcttggcattcgtattgggttttatcggtgtgaaaatgctgataatgcattgggtgcatatcccgatttccgtttcgctgtcggtcgtgttcggcgcattgggtgcatcggtgttgacttctttggtttatacgaaaaaaacaggccgataa

SEQ ID NO: 71262 - DNA, 3486 bp, Neisseria meningitidis
atgcgcctgacccacatcaaactctccggcttcaaatcttttaccgacccgaccacgattcatgttccggggcagcttgtcgcggttatcgggccgaacggttgcggcaagtcgaatgtgattgacgcggtgcgctgggtgttgggtgaggcttcggcgaagcagcttcgtggcgagagtatgcaggacgtgatttttaacggtgcggcgacgcgccgtcctgcgccgagggcttcggtggagctggtgtttgacaacagcgaccacagtttgcagggtgcgtggggacagtatgccgaggtgagcatcaagcggcagctgacgcgtcagggcgaatcgacttatttcatcaacaatcagaccgtgcgccgccgcgacattaccgatttatttttgggtacgggcgtgggtgcgcgcggttatgccgttatcgagcaggggatgatttcgcgcatcatcgaagcgcggccggaggagttgcgtgcctatatcgaggaggcggcaggtgtgtccaaatataaggaacgccgcaaggagacggaaggccgtctgaaagacacgcgcgagcatttgcagcgtttgggcgatttgcagaacgaattggcgcgtcaggtggaaaagctggagaaacaggcggaaaccgccgaacgctacaaatccctgaccgcgcagttgaaccggcaacaggatttgctcgattacgcccaatggcagcaatcgcttgccgccgccgacaaggcgaccgagcagcatcagtctttgcaggcgcagcaggacgaaaccgccgcgcaggttcaggcgttaaacgacgaagtacacgccttgcagaccgccgaacagtcgcagcaacaggcggtgcatgaattgagcaacaaacgcggcgtgttgcgcgagcagattgcccgtttggaagaacaaatccgccatcagcaaaacctgcaccaacgcatcgaacgcgacaagcaggcggcgcaggcgcagatgcagcgtattcatcaagagcagcagcaaatccgcgtgcagcttgaagaaaacgagttatacgtcgaagaaaagcaaaccgagctggcggagtgggcgatgcaggttgccgaacacgaagagcgtctgcccgaattggaagaaacccaaaccgcgctcaatgccgccttccaaacccagcaggacgaggcaaaccgcatccgccgcgaactggcgttgaagcagcagcagcttgcccatgccgaacaaaccgttgccaagcacgaagagcgcaaaggccgtctgaaacaggagaaccaagccctgaacctgcccgacgaagcggaaaccgccgccgcgcaggaggccgctgccttgttgcaaagccggcaagagcattacgaagaacaaatcatcgccgccgaagaagccttacacgccgcccgcgaggcgtttcagacggcctcaaaccgcttccaaagcctgaagcagcaacatatcaccttgcaggcgcagcagcaggcgttgtcgcaaatcctgtcgcaacagcaggaagcagccgatttctggcaggcaaccggccacgccgccgcgccgcaactgtggcaacacattaccgcgcctgctgagtggcagcacgccctgtccgtcatccttgccgaacgcctgcacgcccgcgacgtgccgcaaggtttcgtaccgcccgaacctttgccgcaggggcaggcggcgtggctttcagacggtctctccggcggcatcaaaaaatccctgcccgtacaggcattgctgaaccaaatccaagcgcagccgccgtttcagacggcattgcaccactggctcgacggcgtattgtgcgcgcccgatttgagctacgccctcgcgcatcaaagcgatttgggcgcacaccaaatctggctcacacccgaaggccatcaggtcgataaagtcagcgttctgctctatgccaagcccgcgcaggaaagcttgattgcccaaaaagcgcgcctcgacggcatcgcttccgaactggaaagcctcgcccccgaactttctgccgccgaagccgcgttcaaacaggcggaagccgccgtgcgctcgtccgaagtgcagcataaaaacctgatgcagcagcaacagcagcacacgcgccaatacagccaagcgcagcaacgcgccgccgaacttctggcgcgtaccaaccaagggcaaatccgccgcgaacacatcgagcgcgaactggcgcagttggcggaagagcagaccgtgttgcaacacgcgtccgacgggctttcagacgacattgctactttgcaggaagccgccgccgaactcgaacaccagcagcaaaccgccgcacacagccgccaagagcagcaaggccgtctgaaacaggcgcagcttgccctgctggaagccaaccgccaatatgggcttgccgaagtcgccgtccacaaactcaaccagcaaaaacaaaactaccagcagcaaatcgcccgactcgaacagcaaaccctagactggcaggaacgccagcaagagcttgtcctcgcctatgaaaccgagttccaaaacgacgagcagcacatcaagctcgacgagctgaccgaatccgtacacacgctggacgaagaatacatcgccgtgcaggaaaaactcacgcagattcaggagcagggtagggaacaatacgcccgcgtacaaaccctgcaaacccagttgccacagcttcaggccgccacccaaaccgccctgttgcaacaacaggaagccctgatcaacgccaaacgctaccatcaaaacctgaccgaacgcgccgccgatttggatgcgctcgaagcgttggcgaaagaatcgccgaaagtattgaacagcagcatcggcagcctctcgcaacaaatcgaagccctcggcgcggtcaacctcgccgccctgcaagaactcgaagaagcgcgcgaacgcgacggctactaccgcagccaaagcgaagacgtgcaggccgccatcaccattttggaagaagccatcgcccaaatcgacgacaaaaccaaagcgcgtttcaaagaaaccttcgacgccgtcaacggcaaagtccaaaccttcttcccgaccctgttcggcggcggcgaagccactctcaaaatgataggcgacgacctactgaccgccggtgtgtccattatggcgcgtccgcccggcaagaaaaacagcaccatccacctcctctccggcggcgaaaaagccctcaccgccatgagcctcgtgttcgctctgttcagcctcaaccccgctccgttctgccttttggacgaggtcgatgccccgctggacgacgccaacacctcgcgtttctgcaacctggtcaaagaaatgtcggcgcaaacccagttcctctacatctcccacaaccgcctgaccatggaaatggcagagcagctggtcggcgtaaccatgcaggaaaaaggcgtatcgcgcgtcgtcgccgtggacatcaagcaggcgttggaaatggcggaagccgtttga

SEQ ID NO: 71263 - DNA, 471 bp, Neisseria meningitidis; identical to SEQ ID NO: 70060

SEQ ID NO: 71264 - DNA, 1335 bp, Neisseria meningitidis; identical to SEQ ID NO: 55835

SEQ ID NO: 71265 - DNA, 306 bp, Neisseria meningitidis
atgattaccttgacgcattatctggtattgggcgcgctcctgttcggtatcagcgcaatgggtatcttcatgaaccgtaaaaacgtgctggtattgctgatgtccatcgagctgatgcttttggcggtgaacttcaactttatcgccttctcgcaacatttgggcgataccgccggacagattttcgtgttcttcgtattgaccgttgccgctgccgaatctgccatcggtttggcaattatggtgctggtgtaccgcaaccgacaaacgattaatgttgccgatttggatgggttgaaagggtaa

SEQ ID NO: 71266 - DNA, 645 bp, Neisseria meningitidis; identical to SEQ ID NO: 55078

SEQ ID NO: 71267 - DNA, 1773 bp, Neisseria meningitidis
atgattccatccgacttcattgacgagcttttagccaaaaccgatattgtcgatattatcgacgagcaggttccgctgaaaaaaggcggggcgaactatatggcgtgttgcccgttccacaaggaaaaaacgccgtcgttttcggtcagtccaaccaagcagttttaccattgtttcagttgcggggcgcatggttcggcgattggttttgtgatggagcatcaggggctgtcgtttccggaggctgtgcagtttcttgccgaccgtgtgggcatggttgtgcctaaagtgcgtgggcagaacgataatcccgaagtccgtgccgaacgtaagaaaaaacagcagacgctggaagaaacgacggcggcggcggctgatttttacgcgcaacagctaaaattcaatccggcggcgaaggcttatttggacaagcgcggcttgagcgcggaagtcatcgcgcattatggtttgggctacgcgcccgacggctggcagcctttggcgcaagtattccaaccgtacccgaataccgcgttggtggatacgggtatggtgattgacaatgaggggcggtattacgaccgattccgtcatcggattatgttccccatccgcaatccgcgcgggcaggtcatcggtttcggcggcagggtgctggacgactccaaacccaaatatctaaactctcccgatacgcctttgtttgataaggggaaaaacctttacggcttgtatgaagggcgtgctgctgtcaaggaagtggggcggattctggtggtcgaaggctatatggacgtggtcgcgctggcacagttcggcgtgggctacggcgtggcggccttgggcacggcaacaacagcggaacacgtcaaaatcctgatgcgtcaggcggacagtatttatttctgtttcgacggcgacagcgcggggcgcaaagcggcttggcgcgcgctggaaaacgcgctgccgcagttgaaggacgacaaatcgctgcattttttgttcctgccggaagaacacgaccccgacagttacatccgtgcctacggcaaagcgcaatttgaagacgcgcttctgaatcaaagcaagcctttgtcggagtatttctgggaacacctttcagacggcattcatctcaatacgcaggaaggcaaggcggaattggtgaaaaccagttcgccgcttttggcgcagattaccgcgccggcattggcttatttgttaaaacaacggcttagcgaactggtcggcatcgaccccgacaacctcgcgcaactgctaggacaggaagcgccgaagcggcacgtcaaacaaaaaaactacaaactgcctccgatttccgtcaaacagcccgtcatgctgacgctggtacagcggcaaatccgcagcctcttgataaatccggattgggctgcatatatagacctgcccgattatctggcgttggacggtgatttcgcctgccttgccaatcttgccgaatcgattaaaaaccatgccgccgtacccgaaaccgctcaggttttagagtatatgcgcggctcgccttacgaagaaacgataacccgaatcttccattcaacgcaccaatcggaagaaatgaacagcagcagtgaagaagattgcgagaatttccaaatcggcatgaaaaaactgctcaatgagttaaaatacagccaaatcgaaacattaaaacaaaaaagcctgcaatccggcttaaatgaaagcgagaaaaaacttttgctgtcgttgctgaccgcaaaacaaaattga

SEQ ID NO: 71268 - DNA, 780 bp, Neisseria meningitidis; identical to SEQ ID NO: 54674

SEQ ID NO: 71269 - DNA, 1146 bp, Neisseria meningitidis; identical to SEQ ID NO: 55157

SEQ ID NO: 71270 - DNA, 978 bp, Neisseria meningitidis
atgatttatccgtggcataatgagcaatggcggcagattgcggaacattgggagcgtcgtcccaatgcatggctgtttgccggcaaaaaagatacggggaaaactacatttgcccgctttgcggcgaaggcactgttgtgcgaaaccccttcaccgggctgcaaaccctgtggcgaatgtatgtcctgccatctgtttggacagggaagccatcccgatttttacgaaatcacccccttgtcggacgaacccgaaaacggacgcaaactgttgcagatcaaaatcgatgccgtcagggaaatcatcgataatgtgtacctgacttcggtacggggcggtttgcgcgtgattctgattcatcctgcggaaagtatgaatgtccaagccgccaacagtttgttgaaagtgttggaagaaccgccgccacaagtggtctttttgctggtcagccacgcggcggacaaggttttaccgaccattaaaagtcgctgccggaagatggttttgcccgctccttcgcatggggaagcattggcatatctgcgcgacaggggtgtggcggagccggaagaatttttggcgttccattcgggtgcgccgctgtttgatgaggcggacggtgtccgtgcgttgcggattaaactgttggatattttggcagaaccaaggttgttgaagattttggattacgccgcgcttttcgataaggagaaacttccgctcgacgtatttgtcgggtggatgcagaaatggctggtcgatttgggattgtgcctgcaacacatgaaacccgtctattatcccgcttatgaagacaggctgcttcagacggcatccggtttccgcccgcgcaatgtatttgcggcggaggatatgctcaaacagcttgccccttacgggtttcatactttaaatgtcaaaatgcagatcgagcatctgctcatcaattatttggaattgaagaaagagaacgggtga

SEQ ID NO: 71271 - DNA, 489 bp, Neisseria meningitidis
  misc_feature 470, 471, 472, 473, 474: 'n' is a, c, g or t
atgcgtattccgctgcttgcccctgacaattatgcctttcccgatcctgcctatgctttggcacggtgcgacgggctggtcggcgtgagcagggatttggacgcggggcggctgctcgaggcgtatcagaacggcgtgtttccttggtttttgcgggacggttggtttttttggtatgcggtcgggccgcgtgcggtgattgttcccgaacgtctgcacgttccgtgctcgctggcgaaaacgctacgcaacggcagctatcgggttgcagtcaacggctgttttgcggaagtggtcgcgcattgtgcggcagcggcgcgcccgaatcaggacggaacttggattgcgcccgagtttcagacggcatatttgaagctacacgaaatggggtacgcgcattctttcgagtgccattatcccgatgaaaacggtaaaacgaggttggcgggcggcttttacggcgtgcaaannnnncacacacttaattaa

SEQ ID NO: 71272 - DNA, 273 bp, Neisseria meningitidis; identical to SEQ ID NO: 37320

SEQ ID NO: 71273 - DNA, 1059 bp, Neisseria meningitidis
atgattacaccgcaacaggctatcgaacgattaatcagcaataacgagttgttttacgatgaaatgaccgacttgatgcgtcagattatgagcggaaaagtaccgcccgaacaaattgcagcgattttgaccggcttgcgtatcaaggttgaaaccgtttccgaaattaccgcagctgcagccgtgatgcgcgagtttgcgacaaaagtgccgctggagaatgcagaggggctggtcgatatcgtcggtacgggcggggatggcgcgaaaaccttcaatatttcgacgacttcgatgtttgttgccgcagcggcaggcgcgaaggttgccaaacacggaggccggtcggtctcttcctccagcggcgcggcggacgtggtggagcagatgggggcaaacctcaacctgactcccgaacaggttgcccaaagtatcaggcagaccggtatagggtttatgttcgcccccaatcaccacagtgccatgcgccatgtcgcccctgtacgccgttcgctcggtttccgaagtattttcaacatattgggtccgttaacgaatcctgcgggcgcgccgaaccagcttttgggcgtgttccacaccgatttgtgcggcatcctttccagagtattgcaacagctcggctccaagcatgttttggttgtttgcggggagggcggtttggatgaaattacactgacgggcaaaacacgcgttgccgagctcaaagacggaaaaatcagcgaatacgacatccgcccagaagatttcggtatcgaaacccgccgcaatttggatgaaatcaaagttgccaatactcaggaatctttgttgaaaatgaatgaggtgctggaaggaagagaaggggctgcgcgcgatatcgtattgctcaacaccgccgccgccctgtatgccggaaatgtcgctgcttcgctttcagacggcatatctgccgcacgggaagccatcgattcaggcagggccaaatcgaaaaaagaggagtttgtcggttttcaaccacaacaaagatgccattttcttggaaagatggagcttgggtga

SEQ ID NO: 71274 - DNA, 966 bp, Neisseria meningitidis; identical to SEQ ID NO: 71134

SEQ ID NO: 71275 - DNA, 933 bp, Neisseria meningitidis; identical to SEQ ID NO: 61709

SEQ ID NO: 71276 - DNA, 843 bp, Neisseria meningitidis; identical to SEQ ID NO: 37164

SEQ ID NO: 71277 - DNA, 807 bp, Neisseria meningitidis; identical to SEQ ID NO: 52106

SEQ ID NO: 71278 - DNA, 2391 bp, Neisseria meningitidis; identical to SEQ ID NO: 55188

SEQ ID NO: 71279 - DNA, 828 bp, Neisseria meningitidis; identical to SEQ ID NO: 36245

SEQ ID NO: 71280 - DNA, 276 bp, Neisseria meningitidis; identical to SEQ ID NO: 37190

SEQ ID NO: 71281 - DNA, 324 bp, Neisseria meningitidis; identical to SEQ ID NO: 39252

SEQ ID NO: 71282 - DNA, 660 bp, Neisseria meningitidis; identical to SEQ ID NO: 54356

SEQ ID NO: 71283 - DNA, 936 bp, Neisseria meningitidis; identical to SEQ ID NO: 54951

SEQ ID NO: 71284 - DNA, 441 bp, Neisseria meningitidis; identical to SEQ ID NO: 37247

SEQ ID NO: 71285 - DNA, 429 bp, Neisseria meningitidis
  misc_feature 6, 7, 8, 9, 10: 'n' is a, c, g or t
gtgtgnnnnnggctgaccaatgtcgaactgtccgaacgtgtcgcactttcgccttctccgtgcctgcgccgtctgaagcagttggaagatgccggcatcgtccgccaatatgccgcgctgctgtctccggaatccgtcaacctggggcttcaggcatttatccgcgtttccatccgcaaagcaaaagacgcgcgggaagactttgccgcatcggtccgaaaatggccggaagtcttgagctgcttcgccctgacaggggaaaccgactacctgcttcaggcgttttttaccgatatgaacgcgttttcccattttgttttggatacgctcctgtcccaccacggcgtacaagatgcgcaatcgagctttgttttaaaagaaatcaaacacaccacctccctgccgctcaaccacctgctgaaggaatag

SEQ ID NO: 71286 - DNA, 2580 bp, Neisseria meningitidis
atgcgatacgacaaattaaccgccaaattccaacaagcccttgcagaagctcagagtttggcgttggctgcggacggcagctatctggaagcgggctttgtgttaaaagccctgcttgacgaccaaaacagcggagccgccgcgctcttggctcatgcgggcgtgaacgtgccgcaggtgaaacagcgtttgcagcagcatttaaacagcctgccgaaagtatccggacagggcggcgacattatgcccagccgcgaattgcaggcggtgttgaacctgatggacaaagcagcaaccaaacgcggcgatgcctatatcgccagcgaacttttcctgctcgccttggtgcagcagaacgatgcaaccggcaaaattttgaaagaagccggcgcgaccgaacaaaacattaatgccgcaatcgatgcggtacgaggaggacaaaacgtgaacgatgccaatgccgaagaccaacgcgatgcgctgaaaaaatatacgctcgatttgacccaacgcgcccgcgacggtaagctcgaccccgttatcggtcgtgacgacgaaatccgccgtgcaattcaggtattgcaacgccgcaccaaaaacaaccccgtgctgattggcgaaccgggcgtgggtaaaactgccattgtcgaaggcttggcgcaacgcatcgtcaacggcgaagtacccgaatccctgcgcaacaaacgccttttggttctggacttggcggcattgattgccggcgcgaaataccgtggcgaatttgaagaacgcttgaaaggcgtgttgaacgatttggcgaaagacgacggcaacactctgattttcattgatgaaatccatactttggtcggcgcgggcaaaaccgacggcgcgatggacgcgggcaatatgctgaaaccggccttggcgcggggcgaactgcactgtatcggcgcgaccaccttggacgaataccgccaatacatcgaaaaagacgcggcactcgaacgccgcttccaaaaagtattggtcggcgagcccagcgtggaagacaccatcgccatcttgcgcggtttgcaggagcgttatgaaatccaccacggtatcgatattaccgaccctgctatcgttgccgcagcggagttgagcgaccgctacatcaccgaccgcttcctgcccgacaaagcgattgatttgattgatgaagccgccagccgtgtcaagatggaaaaagaaaccaagccggaagcaatggacaaaatcgaccgccgtctgattcagcttcggatggaaaaggcacacgttgaaaaagaaaaagacgatgccagcaaaaaacgtttggaactgatagacgaggaaatcaacggtctgcaaaaagaatacgccgatttagacgaaatctggaaagccgaaaaagcaatttcagacggtgctgctaatattaagaaacaaattgacgaagtcaaaattaaaatcgaacaggcaaaacggcaaggcgatttggcactggcttcaaaattgatgtatgaagatttggagcatttggaaaaacagcgtgcagccgccgaacgggcagatacggacagcacaaaaccggcaaacaaactcttgcgtaataatgtcggcgcggaggaaatcgcagaagttgtttcccgtatgaccggtattcccgtgtccaaaatgatggaaggcgaacgcgacaaactgctgaagatggaagaagtattgcaccgccgcgtggtcggtcaagatgaagccgtgcgtgccgtgtccgacgctatccgccgcagccgttccggtcttgccgatccgaacaaaccttacggcagcttcctgttcttaggcccgaccggcgtgggtaagaccgaattgtgtaaggcattggcaggcttcctgtttgacagtgaagatcatctgattcgtatcgatatgtccgaatatatggaaaaacacgccgttgcccgcttaatcggcgcgcctccgggctatgtcggctacgaagagggcggctacctgaccgaacaagtccgccgcaaaccgtacagcgtgattctgttggacgaagtggaaaaagcccatcccgacgtgttcaatatcctgttgcaagtattggatgacggccgcctgaccgacgggcaaggtcgcaccgtggacttcaaaaacactgttatcgtcatgacttccaacatcggcagccagcacatccaacaaatgggcacgcaggactacgaagcggtgaaagaagttgtgatggaggatgtgaaagaacatttccgtcctgaaatgatcaaccgtattgacgaagtggtcgtgttccacggtttggatcaggcaaacatccgcagcattgcgaaaatccagctcaaaggtttggaaaaacgtttggaaaaacaaaacctgcgcctgactgtttccgatgccgcactggacatcatcgccaaagccggtttcgacccgatttacggcgcacgtccgctcaaacgcgccatccagtcggaaatcgaaaacccgctggcaaaagccctgcttgccggaaactatgcgcccgaaagcgaaatcagggtggaagccgacggcgacagactgaaatttgcctga

SEQ ID NO: 71287 - DNA, 723 bp, Neisseria meningitidis; identical to SEQ ID NO: 54233

SEQ ID NO: 71288 - DNA, 1338 bp, Neisseria meningitidis
atgactttccaaaacaaaaaaatcctcgtcgccggacttggcggcacgggtatttccatgattgcctacctgcgcaaaaacggcgcggaggttgctgcgtatgatgcggagctgaagccggaacgcgtgtcgcaaatcggtaagatgtttgacgggctggtgttttacacgggccgtctgaaagatgcgctggacaacggtttcgatattctggcgctcagtcccggcatcagcgagcggcagccggatatcgaggcgttcaagcaaaacggcggacgcgtgttgggcgacatcgaattgctggcggacattgtgaaccgccgcggcgacaaggtaattgcgattaccggcagcaacggcaaaaccacggtaacgagcctggtcggctatctctgtatcaagtgcgggctggataccgttatcgcgggcaatatcggcacgccggttttggaggcggaatggcagcgcgaaggcaaaaaggcggacgtgtgggtgttggagctttccagcttccaactggaaaacaccgaaagcctgcgcccgactgcggcgacggtgctgaacatttccgaagaccatctcgaccgctacgacgacttgctcgactacgcgcataccaaagccaagattttccgtggcgatggcgtgcaggttttgaatgtggatgatgcgttctgtcgcgcgatgaaacgggcagggcgcgaggtaaaatggttttcgttggaacacgaagctgatttttggttggaacgtgagacaggccgcctgaaacaaggcaatgaagatttgattgccacgaaagacattccgttgcaaggcttgcacaacgccgccaacgtcatggctgccgtggctttgtgcgaagccgtcggtttgccgcgcgaagcattgcttgaacacgtcaaaacctttcaaggcctgccgcaccgcgtggaaaaaatcggcgagaaaaatggcgtggtgttcatcgacgacagcaaaggcacgaacgtcggtgcgaccgccgccgcgattgccggtttgcaaaatccgctcttcgtgattttaggcggcatgggcaaagggcaggacttcacgcctctgcgcgacgcgcttgccggcaaggcaaaaggcgtgttcctgatcggcgttgatgcgccgcaaatccgccgcgatttggacggctgcggtctgaatatgaccgactgcgccactttggaagaagccgttcagacggcatatgcccaagccgaagcgtgcgatatcgtgctgctcagcccggcttgtgcgagttttgatatgtttaaaggctacgcgcaccgttcggaagtgtttatcgaagcgtttaaggctttgtga

SEQ ID NO: 71289 - DNA, 183 bp, Neisseria meningitidis; identical to SEQ ID NO: 42652

SEQ ID NO: 71290 - DNA, 1134 bp, Neisseria meningitidis
atgagcacccccgccctcctcgtcctcgctgacggcagcgtattccacggcacatcaatcggttacgaaggttcgacttccggcgaagtcgtgttcaatacttcgatgactggctatcaggaaatcctgaccgacccgtcctactgcaaacaaatcgttaccctcacctacccacacatcggcaacaccggcaccaacgccgaagatgaagaaagccgcagcgtttatgccgccggcctgattatccgcgacctgccgctcttgcacagcaacttccgcgcctccgaaagcctgcacgactatctggtacgcaacaaaaccgtcgccatcgccgacatcgatacccgccgcctgaccacgctgttgcgcgaaaaaggcgcgcaaggcggcgcgattctgaccggtgcggacgctacggtcgaaaaagcgcaagaactcatcgccgcgttcggcagtatggtcggcaaagacttggcaaaagaagtttcctgcacggaaacttacgaatggacggaaggcgaatgggcattgggcaagggtttcgttacccctgacgaacagccttaccacgtcgtcgcctacgatttcggcgtgaaaaccaacatcctgcgtatgctcgcctcgcgcggctgccgcctgaccgtcgtccccgcccaaacgagcgcggaagacgtgttggcactcaaccctgacggcgtattcctatccaacggccccggcgaccccgagccttgcacctacgccatcgaagccgtgcaaaaactgatggaaagcggcaaaccgattttcggcatctgcttgggacaccagctcatcagcctcgccatcggcgcgaaaaccctgaaaatgcgcttcagccaccacggtgcgaaccaccctgtgcaagatttggacagcggcaaagtcgtcatcaccagccaaaaccacggttttgccgttgatgccgacaccctgcccgctaacgcacgcattacccacaaatccttgtttgacaacactttgcaaggcatcgagctgaccgacaaacctgtgttctgcttccaaggccaccccgaagccagccccggtccgcaagatgtcggctatttgtttgacaaattcattggcaatatgaaagcggcaaaacgggcataa

SEQ ID NO: 71291 - DNA, 1407 bp, Neisseria meningitidis
atgaccgccgctcctgatatcctctaccggcaagccgccgcccttttggaacaatccaataccgcccaagccctgcccctgttgcaacaggcggcagagcaaggttatgcggaagctgctttcgtattgggcaaccatctgctgcaaaacggccaaccggagcaggcactttcatggttggaagccgccgcggcccaacgccatcccaaagcactcttctccctgctgcaacaacgcgaacacaacggcaccccgaccggacagcttctcaacgactatgcctggctgggtgagcaggggcactcagaagcccaattaatcctcatgcgttaccacgcgcaacgcaacgatccacaatcgctctactgggcggaacttgctgccgcccgatatgccgcacctgcgtattaccatctggcacgccatcatcaacgccaaggcgacgttgaaacagccatcgaacaatacgaaaaagcggcagcactcggcgtaactgctgcctgctggcaactcggtcaaatctacttctacggtacaggtgtcagccccaaccacgcacaagccgaacactatctcgaaccagccgcacaagccggccacatcgccgcacaaacgctgctggctgaccttcttgccgcccaacgcaaacctgaagccttggaatggtatcgtcgtgccgccaataaggagcaagcggaagcacagtctaagctggcccaatacgccctgaccggcgaactttccgaacgcgatccgttccaagcggcacgatatgccaaagccgctgccgagaaaaaccatcctgaagccctgaaaatcatgggcgacctctaccgctacggtctcggtatcaaagccgacaaccatatcgcgcaagattactaccaccgtgccgccgcgctgggttctgccgccgcagcacaaaaactcatcagcgacgccgcgctgtaccatccgcaacaatacgaacaaatcaaaactgccgccctgcaacaacaacaaaccgaaaccatctaccgtttggcggaagcacaagcctgcgccatcggccgtcccgccgactacaatgccgcgcgaaaaaattacatggaagctgccgggttccaccataaaaacgcagcggcagccttaggccgcatctaccattacggcctcggtacggcgcaagatcctcgggcggctgcacactggtacgccattgctgccgaacaaaaccacccttccgcccaataccacctcgcctgtttttactatcacgggcaaggtgtcggctgtcatgttccgaccgcctgctactggctgcaggccgccatcggcaacggccacacttcggccgaatcattaatatccctattagaacaatggcgacgcgaagcacaccatgccatcggacaaaaggccgtctga

SEQ ID NO: 71292 - DNA, 1404 bp, Neisseria meningitidis
atggatactacattgaaaaccaccttgacttctgttgcagcagccttcgcattatccgcctgcaccatgattccccaatacgagcagcccaaagtcgaagttgccgaaacgttcaaaaacgataccgccgacagcggcatccgcgccgtcgatttgggttggcacgactattttgccgacccgcgcctgcaaaagctgatcgacatcgcactcgagcgcaataccagtttgcgtaccgccgtattgaacagcgaaatctaccgcaaacaatacatgattgagcgcaacaacctcctgcccacgcttgccgccaatgcgaacgactcgcgccaaggcagcttgagcggcggcaatgtaagcagcagctacaaagtcggactgggtgcggcatcttacgaactcgatctgttcgggcgtgtacgcagcagcagcgaggcggcactgcaaggctatttcgccagcaccgccaaccgcgatgcggcacatttgagcctgattgccaccgttgccaaagcctatttcaacgaacgttatgccgaagaagcgatgtctttggcgcaacgtgttttgaaaacgcgcgaggaaacctacaagctgtccgaattacgttacaaggcaggtgtgatttccgccgtcgccctacgtcagcaggaagccctaatcgaatctgccaaagccgattatgcccatgccgcgcgcagccgcgaacaggcgcgcaatgccttggcaaccctgattaaccaaccgatacccgacgacctgcccgccggtttgccgttggacaagcagttttttgttgagaagctgccggccggtttgagttccgaagtattgctcgaccgtcccgatatccgtgctgccgaacacgcgctcaaacaggcaaacgccaatatcggtgcggcacgcgccgcctttttcccatccatccgcctgaccggaagcgtcgatacgcattctgccgaattgggcgggctgttcaaaagcggcacgggcgtttggtcgtttgcgccgtctattaccctgccgatttttacctggggtacgaacaaggcgaaccttgatgtagccaagctgcgccaacaggcacaaatcgttgcctatgaagccgccgtccaatccgcctttcaagacgtggcaaacgcattggcggcgcgcgagcagctggataaagcctatgacgctttaagcaaacaaagccgcgcctctaaagaagcgttgcgtttggtcggtctgcgttacaaacacggcgtatccggcgcgctcgacttgctcgatgcggaacgcagcagctattcggcggaaggtgcggctttgtcggcacaactgacccgcgccgaaaaccttgccgatttgtacaaggcactcggcggcggattgaaacgggatacccaaaccgacaaataa

SEQ ID NO: 71293 - DNA, 273 bp, Neisseria meningitidis; identical to SEQ ID NO: 36489

SEQ ID NO: 71294 - DNA, 132 bp, Neisseria meningitidis; identical to SEQ ID NO: 45341

SEQ ID NO: 71295 - DNA, 1071 bp, Neisseria meningitidis; identical to SEQ ID NO: 42097

SEQ ID NO: 71296 - DNA, 1056 bp, Neisseria meningitidis; identical to SEQ ID NO: 55489

SEQ ID NO: 71297 - DNA, 270 bp, Neisseria meningitidis; identical to SEQ ID NO: 55979

SEQ ID NO: 71298 - DNA, 438 bp, Neisseria meningitidis; identical to SEQ ID NO: 55462

SEQ ID NO: 71299 - DNA, 2115 bp, Neisseria meningitidis
atggatttattatcggttttccacaaataccgtctgaaatatgtggtagcggtgctgacgatactgcttttggcggcaatcgggctgcacgcttccgtctatcgcatcttcacacctgaaaacatccgcagccgcctccaacaaagcattgcacacacacaccggaaaatctcgtttgatgcggacattcagcgcaggctcctgccccggccgaccgtcatcctgaaaaacctgaccattaccgaacccggcggcgaccggactgccgtttccgtccaagaaaccaaaatcggattgagctggaaaaacctgtggtcggatcagatacagattgaaaaatgggtggtttcgagtgcggaacttgccctgacgcgcgacgggaaaggtgtttggaacatccaagacctgatcgacagccaaaaacgccaagcctcagtcaaccgcattatcgtcgaaaacagcaccgtccgcctcaatttcctgcaggaacagcttatcctgaaggaaatcaacctcaacctgcaatcccccgattcgtcggggcagccgtttgaaagttcgggcatactggtttggggaaagctgtccgtcccgtggaaaagcagggggctgttcctttcagacggcatcggcacgcccaaaatctcaccgttccattttgaagcttccacttcgctggacggacacggcattaccatttccaccaccggcagcccttctgtccgcttcaacgccggcggagcggatgccgccggcctcggcctgcgtgcagacacttccttccgcaacctccacctgaccgcccaaatccctacgctggcactcagaaataacagcattaaaattgaaaccgtcaacggcgcatttaccgccggcggcgaatatgcccaatgggacggttcgttcaaactcgacaaagccaaccttcactccggcatcgccaacatcggcaacgccgaaatctccggcagcttcaaaacaccgcgccaccagaccaacttctccctcaattcgccgctcgtatggacggaaaacaaagggctggacgcgccgcgcctgtatgtatcgacccttcaggataccgtcaaccgcctgccgcaaccccgtttcatcagccggctcgacggttcgctgtccgtaccgaatctgcaaaattggaatgccgaattaaacggcacattcgaccgccaaaccgttgccgcgaaattcagatacacacatgaagacgcaccgcatctggaagccgccgtcgcactgcaaaaattgaacctgaccccctatcttgacgacgtgcggcaacaaaacggcaaaatatttcccgacaccctcgccaagctgtccggcgacatcgaggcgcacctgaaaatcggaaaagtccaacttcccggcctgcaactggacgatatggaaacctacctccacgccgacaaaggccatatcgcgctcagccgtttcaagtcagggctttacggcggccataccgaaggcggcatcagcatcgccaacacccgtcccgccacttaccgcctgcaacagaatgcaagcaacatccaaatccaaccgctgctgcaagacctgttcggcttccacagcttcagcggcaacggcgacgcggtcatcgacctgaccgcgagcggcgaaacccgaaaagagcttatccgctcgcttcagggcagcctgtcgctgaatatttccaacggtgcatggcacggtatcgacatggacaatatcctgaaaaacggcatttcgggcaaaactgccgacaatgccgcacccagcacacccttccaccgattcacgctcaacagcgaaatttcagacggcatcagccgccacatcgataccgaactcttctccgacagcctctatgttaccagcaacggctataccaatctggatacgcaggaattgtctgaagatgtccttatccgcaacgccgtccatccgaaaaacaaaccgattcccctgaaaatcaccggtacggtggacaagccgtccattaccgtcgattacggcaggctgaccggcggcatcaattcgcgcaaagagaaacagaaaatcctcgaagacaccctgctggaacaatggcagtggctcaaacctaaagaaccgtaa

SEQ ID NO: 71300 - DNA, 642 bp, Neisseria meningitidis; identical to SEQ ID NO: 42771

SEQ ID NO: 71301 - DNA, 1458 bp, Neisseria meningitidis
atgaaaccaaccatcgcgcttgtcggccgccccaacgtcggcaaatctactttattcaaccgtttgacgcgcaccaaagacgcgctcgtacacgacctgcccggtctgacgcgcgaccgccattacggacacggcaaagtcggcagcaaaccttatttggtcatcgataccggcggtttcgagccggttgtggacagcggcattttgcacgaaatggcaaaacaaaccttgcaggctgtcgatgaagccgatgccgtcgtatttttggtggacggccgcaccggtctgaccccgcaagacaaaatcattgccgaccgtttgcgccaaagcccgcgccctgtttatctggcggtaaacaaaggcgaaggcggcaacagggccgtgcttgccgccgagttctacgaacttgctttgggcgacccttatgttatttccggtgcgcacggcgacggcgtgtattacctgattgaagaaattttagaaaacttccccgagccggaagccgaagaagccgatgcaaaacatcccgtctttgccgtcatcggccgtccgaacgtcggcaaatccacactggttaacgccatcctcggcgaagagcgcgtgattgctttcgatatggcaggcacgacacgcgacagcatccacatcgatttcgaacgcgaaggcaaaccgtttaccatcatcgataccgcaggcgtgcgccgtcgcggcaaagtggatgaagcagtagaaaaattctccgttatcaaagcgatgcaggcggttgaagcggcaaacgtcgctgttttggtattggacgcgcagcaggacatcgccgaccaagatgcgacgattgccggttttgctttggaagcaggccgcgccttggtggttgccgtcaacaaatgggacggcatcagcgaagagcggcgcgagcaagtgaaacgtgatatcaaccgcaaactgtatttccttgattttgccaagttccactttatttccgcgttgaaagagcgcggtatagacggtttgtttgaaagcattcaagctgcctacaacgcggcgatgattaagatgccgacgccgaaaatcacgcgcgtcctgcaaagcgcgatcgagcgccaacagccgccgcgcgcaggcttggtgcgtccaaaaatgcgttatgcccaccaaggcggcatgaaccctcccgtaattgtggtacacggcaattcgctgcacgcgatttccgacagctatacgcgctatctgacccaaacgttccgcaaagccttcaatctgcaaggcacgccgctcagaattcaatacaatgtttcggaaaacccgtatgaaaatgcggaagacaaaccgaagaaaaaaccgctgcgccgcgtcagcctgagcaaccgtattgagaaacgcgaaggccgaaaggaagagaaaaaccgcttcaagaagaaaaccaaagtcagtgtgaaaaaacaattcagcaaataa

SEQ ID NO: 71302 - DNA, 726 bp, Neisseria meningitidis; identical to SEQ ID NO: 54640

SEQ ID NO: 71303 - DNA, 429 bp, Neisseria meningitidis; identical to SEQ ID NO: 55737

SEQ ID NO: 71304 - DNA, 1293 bp, Neisseria meningitidis; identical to SEQ ID NO: 54673

SEQ ID NO: 71305 - DNA, 1248 bp, Neisseria meningitidis; identical to SEQ ID NO: 44286

SEQ ID NO: 71306 - DNA, 378 bp, Neisseria meningitidis
atgtgtgagttaaaaaacttcagaagaaatattacttgttttgagggatatgacgaaaattcatttattggcaaatggtatgatgacggggtgtgggatgatgaagaatattggaaattggagaatgatttaatcgaggttagaaaaaaatatccttatccgatggatataccaagggatattgtgattggaatcggtaccattattgattttttaatggttccaaattgggagcttttcgaaattaaagcttccccttggctacctgatagcgtgggaattcatgaacgttatgaaagattcacaacaatgctccgttatatttttaccgagaaagacatagtcaacgtgcgatttgattattacaacaaaaaatag

SEQ ID NO: 71307 - DNA, 924 bp, Neisseria meningitidis; identical to SEQ ID NO: 55838

SEQ ID NO: 71308 - DNA, 852 bp, Neisseria meningitidis
atgaatactataagtagcattatgagtttagaaaattttcaattaataaaaacacaattaggtgttcccagttatgaaaatgatagagttgcaatctatcaaggagattgtatccagttaatggataagatttcaaaaggatcattccaaatgacaatcacatctccaccatacaatattggtaaagaatatgagtctattttagatttggaacattatcttgagtggtgtgaaagatggatgcaatcaatacatcacttaactgaagatagcggatgtttttggttaaatttaggatacttacatgttgaaaaaaagggactagcagttcctattccttatcttttatgggataaaactaactttttccttttacaagaggtggtttggaattatgcagctggagttgcatgccgtaatcgattttccccaagaaatgaaaagttattatggtatgtgaaaaatcctgctaaatatacattcaatttagatgctgtacgcgatcccaacgttaaatatccaaatcagaaaaaaaatgggaaattgaaatgtaatcctctaggaaaaaacccaacggatgtttggcaaatagcaaaagtcacttctggaagaaataggtcatcgagagaaagaactgctcatcctgcccaatttccattggaattaatagaaagaataatccgagcaagtagcaatcaaaatgatgtaatcttagatccatttatcggctcaggaacaaccgccttagccggactaaaaaacaaccgttttgtcataggatttgaaattaacgatgagtatatagatattataaaagaacgcttcaaagagtatgatcttcaaaatacttga

SEQ ID NO: 71309 - DNA, 1014 bp, Neisseria meningitidis
atgaaaaataaaatacaaaatcaattagataatatagttaccttaaataatgagaaatttacttttattgatttatttgcgggaataggtggttttcgcattgcaatggagaatgttggtgggcgatgtgtattttctagtgaatgggatgataaagcccgtcaaacctaccaagtaaattttaatgatattccttatggagatattacattaaaggaaaccaaagcagctattccaagtaagtttgatgtattaacagcaggattcccgtgtcagccattctctatagctggtgtttcaaagaaaaaaagcctaggacgagaaacaggcttcttagataaggcgcagggaactctattttttgatgttgctgaaattattggaaaacatcgacctaaaatttttcttttagagaatgtgaaaaaccttgtttcgcatgacaaaggaaatacatttaaagtaattaaagggactttagaagagcttgactatcagatattttatcaagttatgaatgcaaaatattatgttcctcaaaatagggagcgtatttttattgtaggttttgatagacaatattttaataaggaaataaatttcaattttccttccccaccagaatcacaaccaaaattaaagcaaattttggaagatgatgtagataattcttttactctttctgataacttatggctttaccttcaaaattacgctaaaaaacataaggcaaagggtaatggatttggttttggattagttgatttagatggaatatcacgaactctatctgcacgatattacaaagatggttccgaaatactcatccctcagaaaggaaaaaatcctaggaagctgacacctagggagtgctcgcgtttaatgggatttcctaaagattttgttattgatgcagtatccaagacagctgcatacaagcagtttggcaattcaattgctgtaccgttggttcaagctatttctaaacaaattataaatgagttaaaaaatgaatga

SEQ ID NO: 71310 - DNA, 624 bp, Neisseria meningitidis; identical to SEQ ID NO: 56058

SEQ ID NO: 71311 - DNA, 1215 bp, Neisseria meningitidis
atggaatgggaattcaacagttattacacactgattgccgccacgctcgtgttgctggttggtaaatttctggttcaaaaaatcaaattcttacgagacttcaatattcccgagcccgtggcgggcgggctgattgccgcgattatcctgtttgcgctgcacgaggcgtacggcgtgagcttcaaatttgagaaaccgctgcaaaatgcgtttatgctgattttcttcacgtccatcggcttgagcgcggatttttcccgtttgaaggcgggcggtttgccgctggtggtttttaccgcgattgtgggcggatttatcttggtgcaaaactttgtcggggtcggactggctacggctttgggtttggacccgctcatcggtctgattaccggttcggtgtcgctgacgggcggacacggtacgtcaggtgcgtggggacctaattttgaaacgcaatacggcttggtcggcgcaaccggtttgggtattgcatcggctactttcgggctggtgttcggcggcctgatcggcgggccggttgcgcgccgcctgatcaacaaaatgggccgcaaaccggttgaaaacaaaaaacaggatcaggacgacaacgcggacgacgtgttcgagcaggcaaaacgcacccgcctgattacggcggaatctgccgttgaaacgcttgccatgtttgccgcgtgtttggcgtttgccgagattatggacggcttcgacaaagaatacctgttcgacctgcccaaattcgtgtggtgtctgtttggcggcgtggtcatccgcaacatcctcactgccgcattcaaggtcaatatgttcgaccgcgccatcgatgtgttcggcaatgcttcgctttcgcttttcttggcaatggcgttgctgaatttgaaactgtgggagctgaccggtttggcggggcctgtaaccgtgattcttgccgtacaaaccgtggtgatggttttgtacgcgacttttgttacctatgtctttatggggcgcgactatgatgcggcagtattggctgccggccattgcggtttcggcttgggtgcaacgccgacggcggtggcaaatatgcagtccgtcacgcatactttcggcgcgtcgcataaggcgtttttgattgtgcctatggtcggcgcgttcttcgtcgatttgattaatgccgcgattctcaccggttttgtgaatttctttaaaggctga

SEQ ID NO: 71312 - DNA, 1185 bp, Neisseria meningitidis
atgacaccacaagtcctgaccatattaggcagtaccggcagcataggcgaaagcacgctggacgttgtctcccgccaccccgaaaaattccgcgtattcgcgctggcagggcataagcaggtcgagaaactggcggctcaatgtcaaacgttccaacccgaatatgccgtcgttgccgatgccgaatacgccgcccggcttgaagccctgttgaaacgcgacggcacggcgacgcaggttttacacggcgcgcaggcattggttgacgttgcctctgccgacgaagtcagcggtgtcatgtgcgccatcgtcggggcggtggggctgccttccgcgctcgcagcggcgcaaaaaggcaaaaccatttatctggcgaacaaagagacgctggtggtttccggcgcgttgtttatggaaaccgcccgtgcaaacggcgcggcagtgctgcccgtcgacagcgaacacaacgccgttttccaagttttgccgcgcgattacgccggccgtctgaacgaacacggcatcgcttcgattatcctgaccgcttccggcggcccgtttctgaccgccgatttaaacacgttcgacagcattacgcccgaccaagcggtcaaacaccccaattggcgtatgggacgcaaaatctccgtcgattccgccaccatgatgaacaaaggtttggagctgattgaagcgcattggctgtttaactgtccgcccgacaaactcgaagtcgtcatccatccgcaatccgtgatacacagcatggtgcgctaccgcgacggctccgtgctggcgcaactgggcaatcccgatatgcgaacgcccatcgcttattgtttgggtttgcccgagcgcatcgattcgggtgtcggcgacctggatttcgacgcattgtccgcgctgaccttccaaaagcccgactttgaccgcttcccctgcctgaagctcgcctatgaagccatgaacgcaggcggagccgcgccctgcgtattgaacgccgccaacgaagccgccgtcgccgcctttttggacggacagattaagtttaccgacattgccaaaaccgtcgcccattgtctttcacaagacttttcagacggcataggcgacataggggggctcttggcgcaagatgcccggacacgcgcacaagcgcgggcatttatcggcacactgcgctga

SEQ ID NO: 71313 - DNA, 1899 bp, Neisseria meningitidis
ttgaggcggaatactgcttttcatcgtgaagatggcacggcaattcccgatagcaaacaagcagaagaaaagctgtcgtttaaagaaggtgatgttctgtttttatacggttcaaaagaaaataaacttcaacaacttaaaagcgaaattcataaacgtgatcctaatgtaaaaattaggacatcagaaaatgaaaatgaaaaatatagttataaatttgtagatgcaggttatgtgtttgctaaagacggaaaagatgaaattgagaaaacatcggatgaaaagcagttttctaatcgtttaggctatgacggttttgtatattatctcggagaacatccttcccaatctttaccgagcgcgggaacggtgaaatattccggcaactggcaatatatgaccgatgccatacgtcatcggagaggtaagggggtttccagtgtggatttgggttataccacatattatggtaatgaaattggggcagcttcttatgaggctagggatgccgatggccgggaaaaacatcctgccgaatatacggttaatttcgacaaaaaaaacctggaaggtaagttgattaaaaatcagtatgtgcaaaagagagatgatcctaaaaatccactgaccatttacaacattactgcaacattggacggaaaccgctttaccggcagtgccgaggtcaatcctgatttagcgaaaaaccatgccggtaaggagcatttgtttttccataccaatgccgatcggcggcttgagggcggttttttcggcgataacggagaagagcttgccggacggtttatcagcaacgacaacagcgtattcggcgtattcgcaggcaaacaaaaaacagaggcagcaaacgcagcagatacaaaacctgccctgacgtctggaaaacacaccaaaatcttggattctctaaaaatttccgttgatgaggcaagtgatgaaaatccccgaccgtttgaggtttccactatgcccgattttggtcatcccgacaaacttcttgtcgaagggcgtgaaatctccttgctcaaagatactcaaaccatcgttcttgccgacggtaggacaatgaccgtcagtgcttgttgcgattttctgacctatgtgaaactcggacggataaaaaccgaacgccccgccgtcaaaccgaaggcgcaggatgaagaggattcggacattgataatggcgaagaaagcgaagacgaaatttccgaagatgataacggcgaagatgaagtcaccgaagaagaggaagctgaagaaaccgaagaagaaactgatgaagacgaagaggaagaacccgaagaaactgaagaaactgaagaaactgaagaaactgaagaaaaatcgccgacagaagaaggcaacggcggttcaggcagcatcctgcccactccggaagcctctaaaggcagggacatcgaccttttcctgaaaggtatccgcacggcggaagccgacattccgcaaattggaaaagcacgctataccggcacttgggaagcgcgtatcggcgaacccattcaatgggacaataaggcggataaagcggcaaaagcagagtttaatgttgatttcggcgagaaatcgatttccggaacgctgacggaggaaaacggtgtagaacctgctttccatattgaaaacggcaagattgagggcaacggtttctacgcgacagcgcgcactcgggataacggcatcaatctttcgggaactggttcgaccgaccccaaaaccttcaaagctaatgatcttcgtgtagaaggaggattttacggtccgaaggcggcggaattgggcggtaatattatcgacagcgaccggaaattcggtgcggtattcggtgcgaagaaagatgacaaggaggcaacacgatga

SEQ ID NO: 71314 - DNA, 126 bp, Neisseria meningitidis; identical to SEQ ID NO: 38379

SEQ ID NO: 71315 - DNA, 957 bp, Neisseria meningitidis
atgattttgacaccgccggacacaccgtttttcctccgcaacggcaatgccgatacgattgccgccaaattcctgcaacgccccgcacccgcataccgccgcgagctgcttcccgacagcacgggtaaaaccaaagtcgcctacgacttttcagacggcatttcgcccgatgcgccgctggtcgtgctgtttcacggtttagaaggaagcagccgcagccattacgcggtcgaactgatgctcgcggtacgcagccgcggttggcacggcgcagtcgtccatttccgcagctgcggcggcattgccaacaccgctccggtgttctaccacttgggcgataccgccgaaatcgcctttactttggacacgcttgccgcgcgttaccgtgaaatatacgccgtcggcgtatcgctgggcggcaacgcgctggcaaaatatttgggcgaacagggcgaaaacgcgctgccgcaagccgccgccgtcatctccgcacccgtcgatgcagaggcggcaggcaaccgcttcgacagcggcatcacacggctgctctacacgcgctacttcctccgcacactgatacccaaagcacggtcgctccaaggttttcagacggcatttgccgcagggtgcaaaacactgggcgagtttgacgaccgcttcaccgcaccgctgcacggctttgccgaccggcacgactactaccgccaaacttcctgcaaaccgctgctcaaacacgttgccaaaccgctgctcctgctcaatgccgccaacgaccccttcctgccgcccgaagcgctgccgacaccggacgaagtgtccgaagccgttaccctgttccagccggcacacggtggtcatgtcggctttgtcagcagtaccggcggcaggctgcacctgcaatggctgccgcagaccgtcctgtcctatttcgacagcttccgcacaaacaggcgttaa

SEQ ID NO: 71316 - DNA, 813 bp, Neisseria meningitidis
atggaaaatatcggcaggcagcgccccatcggtgtttttgattcaggaatcggcggtttgaccaatgtgcgcgcgctgatggagcggctgccgatggaaaacatcatttatttcggcgatacggcgcgtgtgccttatggaacgaagtcgaaggcgaccattgagcatttctccatgcagattgtcgattttctgctggaacacgatgttaaggcgatggttatcgcgtgtaatacgattgcggcggtggcggggcagaaaatccgtcaaaagacgggcaatatgcctgtgttggacgtgatttccgccggcgcgaaagccgcgctggcaacgacacgcaacaataaaatcggcattatcgccaccaatacgacagttaacagcaatgcttatgcgcgcgccatccataggaacaaccctgatacgctcgtccgcacgcaggctgcgccgctgctcgttcctttggtggaggaaggttggttggaacatgaagttacccgcctgaccgtatgcgaatacctcaaaccattgcttgcagacggcatcgatacgctggtgttgggatgcacgcactttcccttgctcaagcccttaatcggcagggaggcgcacaatgtcgcgttggttgattctgcaattacgacggctgaagaaaccgcgcgcgtccttgcgcaggaaggattgctcaataccgacaacaataatcccgactatcgtttttatgtcagcgatattcctttgaaattcagaacgataggcgagcgttttctgggtaggacgatggagcagattgaaatggtgtctttgggttaa

SEQ ID NO: 71317 - DNA, 300 bp, Neisseria meningitidis; identical to SEQ ID NO: 55829

SEQ ID NO: 71318 - DNA, 117 bp, Neisseria meningitidis; identical to SEQ ID NO: 42842

SEQ ID NO: 71319 - DNA, 1902 bp, Neisseria meningitidis; identical to SEQ ID NO: 59994

SEQ ID NO: 71320 - DNA, 1104 bp, Neisseria meningitidis; identical to SEQ ID NO: 55122

SEQ ID NO: 71321 - DNA, 1518 bp, Neisseria meningitidis; identical to SEQ ID NO: 41498

SEQ ID NO: 71322 - DNA, 1080 bp, Neisseria meningitidis
atgaaaacactgaccgtacacaccccgtcccacagctaccccatctttatcggcaacgggctgctgccgcaggcaggaagcctgctcaaaccgcatttgggcaaacgcgccgccatcatcgccaacgaaaccgtcgccccgctctacctcggcacgcttcagacggcattggatgcggcaggcgtatcccatttcagcatcatcctgcccgacggcgaggcgcacaaaaactggcagacgctcaacctcatctttgacgggctgatgcaaaaccgcgccgaacgcaaaaccacattaatcgcactgggcggcggcgtgatcggcgacatggtcggctttgccgctgccacctaccagcgcggcgcaccgttcgttcaaataccgaccacactgttgagtcaagtcgactcatcggtgggcggcaaaaccgccatcaaccacccgctcggcaaaaatatgatcggcgcattctaccagccgcaggcggtgcttgccgacttggacacgctgcacaccctgcccgtccgcgaattgtccgccggtatggcggaagtcatcaaatacggcgcgctcggcgacatcggttttttcgaatggctcgaacaaaacatatccggactgatgacgctcgatcgggaaaaactcgcccaagccgtgtaccgctgctgccaaatgaaggcagacatcgtcgcccaagacgaaaccgaacagggcatacgcgcatggctcaacctcggacacaccttcggacacgccattgaaaccgagatgggttacggcacttggctgcatggagaagccatcgccgccggctgcgtgttggcggcgcgtttgtccgaacaactgggcaaaacctccgccgcagataccgcgcggctcgccgccctgctcgaagccgccggactgccgtccgcaccgcccgtgtttgcctttgaaaaatggctcgaacatatgagccacgataaaaaagtcagcggcggcatcatgcgctttatcggtctgaaccggctgggcgaagccaacatcaccgaaattaccgacacggacatcctccgccgcaccctgcaaccgtatctctga

SEQ ID NO: 71323 - DNA, 408 bp, Neisseria meningitidis
  misc_feature 393, 394, 395, 396, 397: 'n' is a, c, g or t
atgccggaaagtatttttaaacagatttcccttgatattttgaaactgcatcgggattctgtttattcgctgcttgccacttccggctgcaactgtcaggtgcatgaagcggcgtatgtcaacatcgacggcaaatattatattgcgctttcatgcgagcccgaggtgggggaagtcaaaacaggcattttgctgattgaggatgaaagccgcaaccttcgtttgagctgggtcggcagtgcgcgggagcttgactgcaaggataatgcctacaaacgcgccctgtccgccttgtctagaaagctggggcggtgtaaggacaagttgcatacggcggttcaaccgtttctgttggagctggtaccggagaaaggcagattttctgtcggcgannnnncacacacttaa

SEQ ID NO: 71324 - DNA, 693 bp, Neisseria meningitidis
atgaaacttatcaaatacctgcaatatcaaggcataggaagccgcaagcagtgccaatggctgattgccggcggttatgttttcatcaacggaacctgcatggacgacaccgatgcagacatcgattcctcatccgtcgaaacgttggatattgacggggaagcagtaaccgtcgttcccgaaccctatttctacatcatgctcaacaagcctgaagattacgaaacttcgcacaaacccaagcactaccgcagcgtattcagcctgttccccgacaatatgcggaacatcgatatgcaggcggtcggcaggctggatgcggatacgaccggcgtattgctgattaccaacgacggcaaactgaaccacaacctgacttcgccgagcagaaaaattcccaagctatacgaagtaacgctcaaacaccccacaggagaaacgctctgcgaaaccttgaaaaacggcgtgctgctccacgacgaaaacgaaaccgtttgtgccgccgatgccgttttgaaaaacccgaccaccctgctgctgaccattaccgaaggaaaataccaccaagtcaaacgcatgatcgccgccgccggcaaccgcgtgctacaccttcatcgtcggcgattcgcacatttggaaacagaaaacctgaaacccggcgaatggaaatttatcgattgtccaaaattctga

SEQ ID NO: 71325 - DNA, 1395 bp, Neisseria meningitidis; identical to SEQ ID NO: 56093

SEQ ID NO: 71326 - DNA, 966 bp, Neisseria meningitidis
atgagctacacgcaactgacccaaggcgaacgataccacatccaatacctgtcccgccactgcaccgttaccgaaatcgccaaacagctgaaccgccacaaaagcaccatcagccgcgaaatcagacggcaccgcacccaagggcagcaatacagcgccgaaaaagcccagcggcaaagccggactatcaaacagcgtaagcgacaaccctataagctcgattcgcagctgattcagcacatcgacacccttatccgccgcaaactcagtcccgaacaagtatgcgcctacctgtgcaaacaccaccagatcacgctccaccacagcaccatttaccgctaccttcgccaagacaaaagcaacggcagcacgttgtggcaacatctcagaatatgcagcaaaccctaccgcaaacgctacggcagcacatggaccagaggcaaagtacccaaccgtgtcggcatagaaaaccgacccgctatcgtcaaccagaaatcccgtatcggcgattgggaagccgacaccattgtcggcaaaggacagaaaagcgcattattgaccttggtcgaacgcgttacccgctacaccatcatctgcaaattggatagcctcaaagccgaagacactgcccgggcagctgttagggcattaaaggcacataaagacagggtgcacaccattaccatggataacggcaaagagttctaccaacacaccaaaataaccaaagcattgaaagcggagacttatttttgtcgcccttaccattcttgggagaaagggctgaatgagaacaccaacggactcatccggcaatacttccccaaacaaaccgatttccgtaacatcagtgatcgggagatacgcagggttcaagatgagttgaaccaccgaccaagaaaaacacttggctacgaaacgccaagtgttttattcttgaatctgttccaaccactaatacactag

SEQ ID NO: 71327 - DNA, 186 bp, Neisseria meningitidis; identical to SEQ ID NO: 39217

SEQ ID NO: 71328 - DNA, 3309 bp, Neisseria meningitidis; identical to SEQ ID NO: 70513

SEQ ID NO: 71329 - DNA, 966 bp, Neisseria meningitidis
atgagctacacgcaactgacccaaggcgaacgataccacatccaatacctgtcccgccactgcaccgtcaccgaaatcgccaaacagctgaaccgccacaaaagcaccatcagccgcgaaatcagacggcaccgcacccaagggcagcaatacagcgccgaaaaagcccagcggcaaagccagactatcaaacagcgtaagcgacaaccctataagctcgattcgcagctgattcagcacatcgacacccttatccgccgcaaactcagtcccgaacaagtatgcgcctacctgtgcaaacaccaccagatcacgctccaccacagcaccatttaccgctaccttcgccaagacaaaagcaacggcagcacgttgtggcaacatctcagaatatgcagcaaaccctaccgcaaacgctacggcagcacatggaccagaggcaaagtacccaaccgtgtcggcatagaaaaccgacccgctatcgtcgaccagaaatcccgtatcggcgattgggaagccgacaccattgtcggcaaaggacagaaaagcgcattattgaccttggtcgaacgcgttacccgctacaccatcatctgcaaattggatagcctcaaagccgaagacactgcccgggcagctgttagggcattaaaggcacataaagacagggtgcacaccattaccatggataacggcaaagagttctaccaacacaccaaaataaccaaagcattgaaagcggagacttatttttgtcgcccttaccattcttgggagaaagggctgaatgagaacaccaacggactcatccggcaatacttccccaaacaaaccgatttccgtaacatcagtgatcgggagatacgcagggttcaagatgagttgaaccaccgaccaagaaaaacacttggctacgaaacgccaagtgttttattcttgaatctgttccaaccattaatacactag

SEQ ID NO: 71330 - DNA, 1170 bp, Neisseria meningitidis; identical to SEQ ID NO: 61271

SEQ ID NO: 71331 - DNA, 1797 bp, Neisseria meningitidis
atgaacaaaatataccgcatcatttggaatagtgccctcaatgcctgggtcgtcgtatccgagctcacacgcaaccacaccaaacgcgcctccgcaaccgtggcgaccgccgtattggcgacactgttgtttgcaacggttcaggcgaatgctaccgatgacgacgatttatatttagaacccgtacaacgcactgctgtcgtgttgagcttccgttccgataaagaaggcacgggagaaaaagaaggtacagaagattcaaattgggcagtatatttcgacgagaaaagagtactaaaagccggagcaatcaccctcaaagccggcgacaacctgaaaatcaaacaaaacaccaatgaaaacaccaatgaaaacaccaatgacagtagcttcacctactccctgaaaaaagacctcacagatctgaccagtgttgaaactgaaaaattatcgtttggcgcaaacggtaataaagtcaacatcacaagcgacaccaaaggcttgaattttgcgaaagaaacggctgggacgaacggcgaccccacggttcatctgaacggtgtcggttcgactttgaccgatacgctgctgaataccggagcgaccacaaacgtaaccaacgacaacgttaccgatgacgagaaaaaacgtgcggcaagcgttaaagacgtattaaacgcaggctggaacattaaaggcgttaaacccggtacaacagcttccgataacgttgatttcgtccgcacttacgacacagtcgagttcttgagcgcagatacgaaaacaacgactgttaatgtggaaagcaaagacaacggcaagaaaaccgaagttaaaatcggtgcgaagacttctgttattaaagaaaaagacggtaagttggttactggtaaaggcaaagacgagaatggttcttctacagacgaaggcgaaggcttagtgactgcaaaagaagtgattgatgcagtaaacaaggctggttggagaatgaaaacaacaaccgctaatggtcaaacaggtcaagctgacaagtttgaaaccgttacatcaggcacaaatgtaacctttgctagtggtaaaggtacaactgcgactgtaagtaaagatgatcaaggcaacatcactgttaagtatgatgtaaatgtcggcgatgccctaaacgtcaatcagctgcaaaacagcggttggaatttggattccaaagcggttgcaggttcttcgggcaaagtcatcagcggcaatgtttcgccgagcaagggaaagatggatgaaaccgtcaacattaatgccggcaacaacatcgagattacccgcaacggtaaaaatatcgacatcgccacttcgatggcgccgcagttttccagcgtttcgctcggtgcgggggcggatgcgcccactttgagcgtggatgacgagggcgcgttgaatgtcggcagcaaggataccaacaaacccgtccgcattaccaatgtcgccccgggcgttaaagagggggatgttacaaacgtcgcacaacttaaaggcgtggcgcaaaacttgaacaaccgcatcgacaatgtggacggcaacgcgcgtgcgggcatcgcccaagcgattgcaaccgcaggtctagttcaggcgtatctgcccggcaagagtatgatggcgatcggcggcggcacttatcgcggcgaagccggttacgccatcggctactccagtatttccgacggcggaaattggattatcaaaggcacggcttccggcaattcgcgcggccatttcggtgcttccgcatctgtcggttatcagtggtaa

SEQ ID NO: 71332 - DNA, 363 bp, Neisseria meningitidis
atggatatccgatatttcggcacaacgccccgctattccgaagccatcggcgcaaacggcttgattttcctctccggcatggttcccgaaaacggtgaaacagctgccgaacagactgccgacgtgcttgcccaaatcgaccgctggctggcggaatgcggctcggacaaagcgcacgttttggatgcggtcatctatctgcgcgatatgggcgactatgcggaaatgaacggcgtgtgggacgcttgggttgccgccggcagaacgcccgcccgcgcctgcgtggaagcgcggctcgcccgtccggagtggcgcgtcgaaatcaaaataaccgccgtgaagagagacgcggcaactgcataa

SEQ ID NO: 71333 - DNA, 486 bp, Neisseria meningitidis; identical to SEQ ID NO: 61984

SEQ ID NO: 71334 - DNA, 279 bp, Neisseria meningitidis; identical to SEQ ID NO: 36597

SEQ ID NO: 71335 - DNA, 576 bp, Neisseria meningitidis; identical to SEQ ID NO: 37908

SEQ ID NO: 71336 - DNA, 843 bp, Neisseria meningitidis
atgtgtcaactgctgggcatgaactgcaatacgccgaccgatattatgttttcctttgaaggcttccgccggcgcggcggcattaccgaccatcatgccgacggtttcggcatcggctttttcgaaggcaaaggcgtgcgcctgttccatgacgacaaacccagtgccaattcgcccgtcgccgacctcgtgcgcgcctaccagattaaatcggaaaacgtcgtcgcccatatccgcaaagcatcgcaaggacaaacctcgctggcgaacacccatccctttatgcgcgaaatgtggggtggctactggctgtttgcccacaacgggcatttgattgattttttccccgaacagggcgaatttttccaccccgtcggcacaaccgattccgaacgcgcgttctgccacatcctcaaccgcctgcgcacccgctttgccgcccgtcccgacgacgacacgctgtttgacgcgattgcggggctgacgcacgaaatccgcaagttcgggctgtttaactttatgctttcagacggcattgccctgtttgcccacgccagcacactgctgcactacatcgtccgccaagccccgttcggcaaggcgcgcctgctcgacgacgacgtgatggtcgattttgccgaagtaaccacgccctccgaccgcgtcgccgttatcgccaccctgccgctgacccgcgacgaatcatggtcccaacttgccgtggacgaactggtcatgttccgcgaaggtaacatcgtccgacacgaccgtcccgaaaaccccgtttatatgagtgtcgaagaaggtttggaaaccgcgcgcgccgccggcgtcgccgtctga

SEQ ID NO: 71337 - DNA, 966 bp, Neisseria meningitidis; identical to SEQ ID NO: 43159

SEQ ID NO: 71338 - DNA, 1116 bp, Neisseria meningitidis; identical to SEQ ID NO: 60911

SEQ ID NO: 71339 - DNA, 312 bp, Neisseria meningitidis
atgatgagtgtaaaagaattattcaaagtcatcttagatgaaaataaagattttcctattagaacgattcatcgtaccccgatggggatacttcccaaacctgttgctttaagtattgttcaatatgaaaatgaccaaggattttatttgttttatttgaatgaggctggtcaggaacaaacggatacttatcacgaaacattagattcggcatttgaacaggcggagtttgaatttggaatcagcaaagaagaatggatgcaaagtccttatgtagcaagcgtagaaaacaacaatcaaaaggtcatctga

SEQ ID NO: 71340 - DNA, 345 bp, Neisseria meningitidis; identical to SEQ ID NO: 40340

SEQ ID NO: 71341 - DNA, 369 bp, Neisseria meningitidis; identical to SEQ ID NO: 38525

SEQ ID NO: 71342 - DNA, 780 bp, Neisseria meningitidis; identical to SEQ ID NO: 54867

SEQ ID NO: 71343 - DNA, 510 bp, Neisseria meningitidis; identical to SEQ ID NO: 55571

SEQ ID NO: 71344 - DNA, 1341 bp, Neisseria meningitidis
ttgcacacccttctagcttttatcttcgccatcctgattttggtcagcctgcacgagttcggacactacatcgttgccagattgtgcggtgtcaaagtcgtacgcttttccgtcggcttcggcaaaccgtttttcacccgaaagcgcggcgacaccgaatggtgcctcgccccgattccgttgggcggttacgtcaaaatggtcgacacgcgcgaaggcgaagtatcagaagccgatttaccctacgcttttgacaaacaacaccccgccaagcgcatcgccatcgtcgccgccggcccgctgaccaacctcgcactggcggttttgctgtacggactgagcttttccttcggcgtaaccgaactgcgcccctacgtcggcacagtcgaacctgacaccattgccgcccgcgccggcttccaaagcggcgacaaaatacaatccgtcaacggcacacccgttgcagattggggcagcgcgcaaaccgaaatcgtcctcaacctcgaagccggcaaagtcgccgtcggcgttcagacggcatcgggcgcgccagccgtccgcaccatcgatgccgcaggcacgccggaagccggtaaaatcgcaaaaaaccaaggctacatcggactgatgccctttaaaatcacaaccgttgccggcggcgtggaaaaaggcagccccgccgaaaaagcaggcctgaaaccgggcgacaggctgactgccgccgacggcaaacccatcgcctcatggcaagaatgggcaaacctgacccgccaaagccccggcaaaaaaatcaccctgaactacgaacgcgccggacaaacccataccgccgacatccgccccgatactgtcgaacagtccgaccacaccctgatcgggcgcgtcggcctccgtccgcagccggacagggcgtgggacgcgcaaatccgccgcagctaccgtccgtctgttgtccgcgcattcggcatgggctgggaaaaaaccgtttcccactcgtggacaaccctcaaatttttcggcaaactaatcagcggcaacgcctccgtcagccatatttccggtccgctgaccattgccgatattgccggacagtccgccgaactcggcttgcaaagttatttggaatttttggcactggtcagcatcagcctcggcgtgctgaacttgctgcccgtccccgttttggacggcgggcacctcgtgttttatactgccgaatggatacgcggcaaacctttgggcgaacgcgtccaaaacatcggtttgcgcttcgggcttgccctcatgatgctgatgatggcggtcgccttcttcaacgacgttacccggctgctcggttag

SEQ ID NO: 71345 - DNA, 654 bp, Neisseria meningitidis; identical to SEQ ID NO: 55103

SEQ ID NO: 71346 - DNA, 3615 bp, Neisseria meningitidis; identical to SEQ ID NO: 54311

SEQ ID NO: 71347 - DNA, 1188 bp, Neisseria meningitidis; identical to SEQ ID NO: 54494

SEQ ID NO: 71348 - DNA, 900 bp, Neisseria meningitidis; identical to SEQ ID NO: 55702

SEQ ID NO: 71349 - DNA, 930 bp, Neisseria meningitidis; identical to SEQ ID NO: 51428

SEQ ID NO: 71350 - DNA, 237 bp, Neisseria meningitidis; identical to SEQ ID NO: 39540

SEQ ID NO: 71351 - DNA, 558 bp, Neisseria meningitidis; identical to SEQ ID NO: 54438

SEQ ID NO: 71352 - DNA, 246 bp, Neisseria meningitidis; identical to SEQ ID NO: 43892

SEQ ID NO: 71353 - DNA, 174 bp, Neisseria meningitidis; identical to SEQ ID NO: 55983

SEQ ID NO: 71354 - DNA, 1467 bp, Neisseria meningitidis; identical to SEQ ID NO: 64231

SEQ ID NO: 71355 - DNA, 906 bp, Neisseria meningitidis
  misc_feature 6, 7, 8, 9, 10: 'n' is a, c, g or t
gtgtgnnnnnccctttcccccttttcagacggcctcgatttcgagtggcacgtctgcaatcccttgattgattcctcctccgttacgctgcaacactggcgcgattggctggacatcattgccgacaaactcccttcatgcgacggcatcctgatactgcacggcacggacagcatggcgtacaccgccaatctcctcgcgctcgctctgcaaggtttgggcaaaccgattgtcctgactggttcccaatggccttacgccgccgaaaacagcgatgccccgcgcaacctctccaccgccgttgccgccttcagcctcaagctcaaacaaaccgtcatcgcgtttgacggcaaactgtatcccgccgtcggcagcagcaaagtcagcaccgaaaccgcctcaggcttcgataatccgcatttcggtgtcatcgccgaatgggatgaaactcaaggctggtacaatcttcgtattccgtcccaagatgcggcggccgtttcagacggcctcaaaatccgctatcctgacccgcaggcaaaaatcgccgtccgcacgcttatccccggctttgccgtccaagaacttgccgacggactcggacagtttcccgcccaagcccttatcctgcaaagctacggacacggcaacacgcccgcagacgaaggttttatccgcgccgtccgagacttcgcgcggcagggcaaactgctgctcaacatcagccaagtccgacaaggcaaaaccgccgccgtttacgcgcaaggcaacgcgttccgcaactcgggcatcatcaacggcggcaaatgcaatttggaaaccgcaaccgcattgatgacgcttgccgtttctgaaggatggggcgcggacgaggtgaaacacgagttgcagcggttggggctggtgtga

SEQ ID NO: 71356 - DNA, 384 bp, Neisseria meningitidis
ttggacgacggtacctatcgcgcggtgttggagcgtgtgacgggcaagcggtcgtgtgcggatatggatgtttccgaacttgagtctgttgtcgctgatatgcggtcgcacggatttaagcctaaagcaaaaggtaacccacacggcaaaccgcatctgcgtcggacatcatcagcggcaatgttggacaaagtcgaagccctgctgaccgtcggcggcaaacattggaactatgcacacgcaatggcgcggcggatgtttggtaaggataaggtcgaatatttagacgatacgcagctacataaactggttgctgcgttgcagattgcggaaaacaggaaaacggaaaaagcgggtggggatgatggcgttcgaaaaagttga

SEQ ID NO: 71357 - DNA, 600 bp, Neisseria meningitidis; identical to SEQ ID NO: 54214

SEQ ID NO: 71358 - DNA, 339 bp, Neisseria meningitidis; identical to SEQ ID NO: 39659

SEQ ID NO: 71359 - DNA, 279 bp, Neisseria meningitidis; identical to SEQ ID NO: 36778

SEQ ID NO: 71360 - DNA, 312 bp, Neisseria meningitidis; identical to SEQ ID NO: 40776

SEQ ID NO: 71361 - DNA, 1374 bp, Neisseria meningitidis; identical to SEQ ID NO: 54389

SEQ ID NO: 71362 - DNA, 132 bp, Neisseria meningitidis; identical to SEQ ID NO: 38518

SEQ ID NO: 71363 - DNA, 627 bp, Neisseria meningitidis; identical to SEQ ID NO: 55000

SEQ ID NO: 71364 - DNA, 678 bp, Neisseria meningitidis; identical to SEQ ID NO: 51590

SEQ ID NO: 71365 - DNA, 1863 bp, Neisseria meningitidis
atggctcttttgcagatttcagaaccgggtatgtccgccgccccgcaccggcaccgtttggcggcaggcatcgatttgggtacgaccaacagcttggtcgccaccgtccgcagcggcagtgccgcctgtctgcccgatgccgaagggcgcgttaccctgccttccgtcgtccgctatctggaaaacggcggcattgaagtcggcaaaaccgccctgtccgcccaaaaaaccgacccgctgaacaccgtcagctccgccaaacgccttatcgggcggacgcttgccgatctgcatcaaaatacgcattacctgccttaccgtttcggcgacaatcaacgcgttatcgaactgcatacgcggcagggggtgaaaacgcctgtcgaagtgtcggcggaaatcctcaaaacccttaaatcgcgcgccgaagaaaccttggtcggcgatttggtcggcgtggtgattaccgtccccgcctatttcgacgatgcccaacgccaggccaccaaagatgccgcgcgtctggcgggtttgaacgtcttacgcctgctcaacgaacctaccgccgccgcaatcgcctacgggctggacaacgcctcggaagggaagtttgtcgtgtacgacttagggggcggcacattcgacgtatccgtattgcaactgaccaaagggctgtttgaagtcaaggccaccggcggcaacagcgcgttgggcggcgatgatttcgaccaccgcctgttctgccgcctgctcgaacaaaacggactctcccaactcaacgaacaagacagccaactcctgctctcgctcgtccgcgccgccaaagaacaattaaccacgcaaaccgaagcgcgcattcaggcgacgctttcagacggcatggcaatcgacacaagcatcagtcgcgccgagttccacaacctgacgcagcatttggtgatgaaaacactcgagccggtcaagcaggcgttgaaagatgccggtgtcggtaaaaacgaagtcaaaggcgtgattatggtcggcggttcgacccgtatgctgcacgtccagcaggcagtcgccacctttttcggacaaaccccgctgaacaacctcaatcccgacgaagtcgtcgcgctcggcgccgccatacaggcaaacgtcctcgccggcaacaaagccgacggcgaatggctgctgctggacgttacgcccttgtcgctcggtttggaaacctatggcgggcttgccgaaaaaatcatcccgcgcaattccaccatccccaccgcgcgcgcgcaggactttaccaccttcaaagacggtcaaaccgcgatgacgatacacgtcgtgcaaggcgaacgcgaactggttgccgactgccgcagccttgccaaattcaccctgcgcggcattccgcctatggcggcgggtgcggcgcgtatccgcgtaaccttccaaatcgatgccgacgggctgttgtccgtttccgcccaagaacaaagcaccggcgtacacgcgcaaatcgaagtcaaaccttcctacggcttggacgacgacaccatcacccaaatgctcaaagacagtatgagcaacgccgccgaagatatggcggcccgcgcccgcgccgaagctgtagtcgaagccgaaagcctgaccgatgccgtcaacgccgccctcgagttggacagcgatttgctggatgccgaagaattgcaacagattcggcaaggcatcgccgatttgcaaggccgtctgaaagacggaaaagccgaagacatccgtgccgccgccgccaaactcggcagcatcaccgacaatttcgccgccaaacgcatgaaccgcaacatccaacgcgcgctgactggtcaaagcgttgataatatttga

SEQ ID NO: 71366 - DNA, 180 bp, Neisseria meningitidis; identical to SEQ ID NO: 61507

SEQ ID NO: 71367 - DNA, 825 bp, Neisseria meningitidis
  misc_feature 4, 5, 6, 7, 8: 'n' is a, c, g or t
gtgnnnnntaacgtttcgtttgaatttttcccgccgaaaaacgaacaaatggaaacgatgctgtgggactccatccaccgtctgcaaaccctgcatcccaagttcgtatccgtaacttacggcgcaaattccggcgaacgcgaccgcacgcacggcatcgtcaaacgcatcaaacaggaaaccggcttggaagccgcgcctcacctgaccggtatcgacgcttctcccgacgaattgcgccaaattgccaaagattattgggacagcggcatccgccgcattgtcgccctgcgcggagacgagccggccggttatgagaaaaaaccgttttacgccgaagacttggttaagctattacgctccgtcgccgacttcgacatctctgtagcagcatatcccgaagtgcatcccgaagcgaaatccgcacaagccgacctgattaatttgaaacgcaaaatcgatgcgggcgcgaaccacgtcatcacccaattcttcttcgatgtggaacgctacctgcgcttccgcgaccgctgcgtgatgttgggtatcgatgtggaaatcgtccccggtattttgcctgttaccaacttcaagcagctcggtaaaatggctcaagtaaccaacgtcaaaatcccaagctggctgtcgcaaatgtatgaaggtttggacgacgaccaaggtacgcgcaatctggtggcggcaagtatcgccatcgatatggtcaaagtcctgtcccgcgaaggcgtgaaagatttccacttctatacgcttaaccgcagcgagctgacttacgccatttgccatattttaggcgtgcgcccttaa

SEQ ID NO: 71368 - DNA, 807 bp, Neisseria meningitidis; identical to SEQ ID NO: 54619

SEQ ID NO: 71369 - DNA, 651 bp, Neisseria meningitidis; identical to SEQ ID NO: 55294

SEQ ID NO: 71370 - DNA, 732 bp, Neisseria meningitidis
gtgtccaccattacgggctatcccgtgcagcccaacaaagccattgtcggtgccaatgccttttcgcatgaatcgggcatccatcaggacggggtgctgaaacaccgcgaaacttacgagattatgtccgccgaatcggtcggctgggcaacaaaccgtttgagcttgggcaaattgtccggccgcaacgccttcaaaaccaagctggcggatttgggcatcgagttggaaagcgaagaggcactgaacgccgcgtttgcccgcttcaaagaactcgccgacaaaaaacgcgaaatcttcgatgaagacctgcacgcactggtatccgacgaaatgggcagcatgaatgccgagagctacaaattcatctcccaaaaaatcagcaccgaaaccggcgaagagccgcgcgccgacatcgtgttcagcatcaaaggcgaagaaaaacgcgcttccgcaaccggttccggtccggttgatgcaattttcaaagcgattgaaagcgtggcgcaaagcggcgcgactttgcagatttattccgtcaacgccgtcacgcaaggtacggaaagccaaggcgaaaccagcgtccgtctggcacgcggcaaccgcgtcgtcaacggtcagggcgcggataccgacgttttggttgccactgccaaagcctacctttccgctttgagcaaactggaatttagtgccgccaaaccgaaagcgcaaggcagcggtacgatttga

SEQ ID NO: 71371 - DNA, 846 bp, Neisseria meningitidis; identical to SEQ ID NO: 54450

SEQ ID NO: 71372 - DNA, 369 bp, Neisseria meningitidis
atgaaaccgttgaaacgacatcccgcccttatcgggctttcgcgtgaccaccaccattcgctttccctgtgcgtgcgtctgttgcggacgccggaagaaaggcatcgggacgaactcgaaccgcatttttccgaattggaaacccattttcgcgaagaagaaaccaagtttgccccaatttggcagaatgtcgccctcgaattgaaacaacgtttcgagaaagaccacgcccgactgcggcagatgatggcaagctccgaatacggtaacgcggcgtggaataccgcttttgccacaaccctgcgcgaccacgcgcgctttgaagaacgcgagctgtttcccgccgccgaaccgtttttgccggcatga

SEQ ID NO: 71373 - DNA, 249 bp, Neisseria meningitidis
atgctgacctcggaacaagtaaaagccatgattgcaggcgtggcaaaatgcgaacatatcgaagtagaaggcgacggacaccattttttcgctgtcatcgtttcatcagaatttgaaggcaaggcacgccttgcacgccaccgcctgattaaagacgggcttaaagcccaactggaaagtaacgaactgcacgcactttccatttcggttgccgccactccggcggaatgggcagccaaagcacaataa

SEQ ID NO: 71374 - DNA, 1515 bp, Neisseria meningitidis; identical to SEQ ID NO: 54849

SEQ ID NO: 71375 - DNA, 1023 bp, Neisseria meningitidis; identical to SEQ ID NO: 40884

SEQ ID NO: 71376 - DNA, 603 bp, Neisseria meningitidis; identical to SEQ ID NO: 61144

SEQ ID NO: 71377 - DNA, 909 bp, Neisseria meningitidis; identical to SEQ ID NO: 54686

SEQ ID NO: 71378 - DNA, 507 bp, Neisseria meningitidis; identical to SEQ ID NO: 68740

SEQ ID NO: 71379 - DNA, 276 bp, Neisseria meningitidis; identical to SEQ ID NO: 38139

SEQ ID NO: 71380 - DNA, 258 bp, Neisseria meningitidis; identical to SEQ ID NO: 55093

SEQ ID NO: 71381 - DNA, 372 bp, Neisseria meningitidis; identical to SEQ ID NO: 55734

SEQ ID NO: 71382 - DNA, 1215 bp, Neisseria meningitidis; identical to SEQ ID NO: 70631

SEQ ID NO: 71383 - DNA, 1173 bp, Neisseria meningitidis; identical to SEQ ID NO: 55592

SEQ ID NO: 71384 - DNA, 735 bp, Neisseria meningitidis; identical to SEQ ID NO: 43353

SEQ ID NO: 71385 - DNA, 291 bp, Neisseria meningitidis; identical to SEQ ID NO: 55020

SEQ ID NO: 71386 - DNA, 537 bp, Neisseria meningitidis
atgtcggcaaccgtccgtatcttaggtatcgacccgggcagccgcgtaacgggtttcggcatcatcgatgtcagggggcgcgatcatttttacgtcgcctccggctgcatcaaaacgcctcccgatgcgcctctggcagacaggattgccgtgattgtgcggcacatcggcgaagtcgttgccgtttacaagccgcagcaggcggcagtggaacaggtgttcgtcaacgtcaatcctgcatcgacgctgatgctcggtcaggctaggggcgcggcattggcggctctggtcagccatggtttgcccgtttcggaatacacggccttgcaggtcaaacaggcggtagtcggcaagggcaaggcggcaaaagaacaggtgcagcatatggtggtgcagatgctcggcttatcgggaacgccgcaggcggatgcggcggatggtcttgccgtcgcgctgacccacgccttgcgcaaccatgggcttgctgccaaactcaatccttcggggatgcaggtcaagcgcggcaggtttcaatag

SEQ ID NO: 71387 - DNA, 561 bp, Neisseria meningitidis
atgaaaatactcgctttattaattgccgctacctgtgctttatctgcgtgtggcggccaagctgaagaacaaccggcatctgcccaacctcaagagcaggcacaatccgaattaaaaaccatgccggtaagctataccgactatcaatcagtagccaataaagggcttgccgaccaaaaaactggtctgacccttccagaacatgttgttcctgccgacaatgcggaagggaagaatctgctgcatgacttttcagacggcctcacattaaccgttgataccgataaagccgacaaaattactgctgtccgagtagtctggaatacagatgcaatgcctcaaaaagcggaaaaactgtccaaagctgctgcagccttgattgcggcaaccgccccgggagaccgcacactgctgcgtgataccggcgaccaaatcaaaatggcaattgacagccataatgcgcaaaaagagccaacccgagaatgggcgcgtggtgggattgcttataaagtcactgttactaatttgccgagcgtggttttgacagcaaaagctgaataa

SEQ ID NO: 71388 - DNA, 2121 bp, Neisseria meningitidis
atgttcgacaaacacgttaaaactttccaatacggcaaccacaccgttactttggaaaccggcgaaattgcccgccaagccgccgctgccgttaaagtctctatgggcgacaccgtggttttggttgccgttaccaccaacaaagaagtgaaagaaggccaagacttcttccctctgactgtcgattacctcgagcgcacttacgccgcaggcaaaattcccggcggtttcttcaaacgcgaaggcaaacaaagcgaaaaagaaatcctgaccagccgtctgatcgaccgtccgattcgtccgctgttccctgaaggtttctaccacgacatccaaatcgtagcgatggtcgtgtccgtcgatcctgaaatcgattctgatattcctgcaatgttgggcgcgtctgccgcgctggtgttgagcggcgtaccgtttgccggcccgatcggcgcggcacgcgtcggttatgtaaacggcgtgtacgttttgaacccgactaaagccgaattggcgaaatcgcaattggacttggtggtcgccggtacttccaaagccgtgttgatggtggaatccgaagccaaaatcctgcccgaagacgtgatgctgggcgcggtggtttacggccacgatcaaatgcaggttgccatcaatgcaatcaatgaatttgccgacgaagtcaatccggaagtttgggattggaaagcacctgaaaccaatgaggaactggttgccaaagtccgcgggattgccggcgaaaccattaaagaagcgttcaaaatccgtcaaaaacaagcgcgttctgccaaattggacgaagcttggagtgcggtaaaagaagccttgattaccgaagaaaccgacacgctggcagccaacgaaatcaaaggcattttcaaacacttggaagccgatgtcgtccgcagccaaattttggacggccaaccgcgcatcgacggccgcgacacccgcaccgtccgtccgctgaacatccaaaccggcgtattgccgcgcacgcacggttccgcattgtttacccgtggcgaaacccaagcccttgccgtagcgactttgggtacttcgcgcgacgagcaaatcatcgacgcgctgtccggcgaatacaccgaccgctttatgctgcactacaactttccgccgtactctaccggcgaagtgggccgcatgggcgcgccgaaacgccgtgaaatcggtcacggtcgtttggctaaacgtgcattgttggccgtattgccgaaacctgaagatttcagctacaccatgcgcgtggtctccgaaattaccgaatctaacggctcttcctctatggcttccgtctgcggcggctgtttgagcctgctgtctgccggcgtgcctttgaaagcacacgttgccggtatcgcgatgggtctgattctggaaggcaacaaatttgccgtcctgaccgacattttgggcgacgaagaccacttgggcgatatggactttaaagtggccggtacgaccgaaggtgttaccgcgctgcaaatggacatcaaaatccaaggcattaccaaagaaattatgcaaatcgctttggcacaggccaaagaagcgcgtctgcacatcttggatcagatgaaagccgccgttgcgggcccgcaagagttgtccgcacacgcgccgcgtttgtttacgatgaaaatcaaccaagacaaaatccgcgaagttatcggtaaaggtggcgaaaccatccgttcgattaccgctgaaaccggtacggaaatcaatattgccgaagacggtacgattaccattgccgcgaccactcaagaagccggcgatgcggcgaaaaaacgcatcgagcagattactgccgaagtggaagtgggcaaagtgtatgaaggcactgtggtgaaaatcctcgacaacaacgtcggcgcgattgtcagcgtgatgccgggcaaagacggtttggtacacatcagccaaatcgcccacgagcgcgtacgcaatgtcggcgactacctgcaagtcggtcaggtggtgaacgtgaaagcattggaagtggacgacagaggccgtgtccgtctgtccatcaaagccctgctggacgcgcctgcccgtgaggaaaatgccgccgagtaa

SEQ ID NO: 71389 - DNA, 621 bp, Neisseria meningitidis
atggccgtacgttccaaatcctcaaaagcgtggctgcacgaacacgtcaacgaccactacgtccatatggcgcaaaaagacggctaccgcgcccgtgccgcatacaaacttttggaaatcaacgaaaaagacaaattaatcaaacccggcacggtacttgccgacttgggcagcgcaccgggaagctggtcgcaggttgccgccaagctgacgggtacttccggagcagttttcgccttggacatcctgcctatggaagccatagggggcgtctccttcattcagggcgacttccgcgagaacgacgtactggcacaattcgaaaccttgttggacaaccgcccgctcgaccttgtaatttgcgatatggcgcccaatatgtcgggaaacgccgtaagcgatcaggcacgcagcttttatctgtgcgaactggctttagacttcgcctcgcaacacctgaaaaccggcggcagctttttggtcaaagtctttcagggtgcaggctatcaggaatacatggcagccatgcgcgaaattttcggcacggtgcagacgcgcaaacccgaagcctcgcgcaatcgctccagtgagatttatttattgggcaaaaataaacgctga

SEQ ID NO: 71390 - DNA, 1047 bp, Neisseria meningitidis
atgattccggccacctacaccctgtcccaaatcaccgcgcggctcggcggcgaatggcgcggcgaggacatttccgttaccgccgtgcgcccgctcgcagacgcgcaggcggaacacatcagcttcctcgccaacccgaaatacaaagccgaagtccacgacagcagcgcgggcgcggtcatcgtttccgccaaagcggcagacgaatttgaagggcgcaacctgattgtcgccgacgatccctatctctatttcgccaaagtcgcccgtctgttttcacccgtcgtcaaagcgcgcggcggcatccatccgaccgccgtcgtcgaagagagtgccaccgttcccgcaagctgcgaaatcggcgcgaacgcctacatcggcgcgaacaccgtactcggcgaaggctgccgcatcttggcaaacgccgtcgtccaacacgattgccgtttaggtgatgaagttgttttacatcccaacgccgtcgtttattacggctgcacactcggcaatcgcgtcgagatccacagcggcgcggtcatcggcgcggacggtttcggactcgcttttgccggcgattcatggttcaaaatcccgcaaaccggcgcggtaacgctgggcgacgacgtagaaatcggctcgaacaccaacatcgaccggggcgcgatgagcgacaccaccgtcggcaacggcaccaaaatcgacaaccaagtccaaatcggacacaactgcaaaatcggttcgcacaccgtcatcgccgccaaaaccggcatctcaggcagcgtaaccataggcagctactgcatcatcggcggcggcgtcggtacggtcggacacatcgaaatcgccgacaaaaccaccatcggcggcggcacgtccgtcacccacagcattaccgaaagcggcaaacacctcgccggcatcttcccgatgtccacccataaagaatgggcgcgcaacgctgtttacatccaccgcttaagcgaaatgaacaaacggctcaaaacactggagcagcagctttcagatgccggtcaagacagcaaataa

SEQ ID NO: 71391 - DNA, 1005 bp, Neisseria meningitidis
atgcaacgacaaatcaaactgaaaaattggcttcagaccgtttatcccgaacgggacttcgatctgacttttgcggcggcggatgctgatttccgccgctatttccgtgcaacgttttcagacggcggcagcgtcgtctgtatggatgcgccgcccgacaagatgagtgtcgcgccttatttgaaggtgcagaaactgtttgatatggtcaatgtgccgcaggtattgcacgcggacacggatttggggtttgtggtattgaacgacttgggcaatacgacgtttttgaccgcgatgcttcaggaacagggcgaaacggcgcacaaagccctgcttttggaggccatcggcgagttggtcgaattgcagaaggcaagccgtgaaggggttttgcccgaatatgaccgtgaaacgatgctgcgcgaaatcaacctgttcccggaatggtttgtcgcaaaagaattggggcgcgaattaacattcaaacaacgccaactttggcagcaaaccgtcgatacgctgctgccgcccctgttggcgcagcccaaagtctatgtgcaccgcgactttatcgtccgcaacctgatgctgacgcgcggcaggccgggcgttttagacttccaagacgcgctttacggcccgatttcctacgatttggtgtcgctgttgcgcgatgcctttatcgaatgggaagaagaatttgtcttggacttggttatccgctactgggaaaaggcgcgggctgccggcttgcccgtccccgaagcgtttgacgagttttaccgctggttcgaatggatgggcgtgcagcggcacttgaaggttgcaggcatcttcgcacgcctgtactaccgcgacggcaaagacaaataccgtccggaaatcccgcgtttcttaaactatctgcgccgcgtatcgcgccgttatgccgaactcgccccgctctacgcgctcttggtcgaactggtcggcgatgaagaactggaaacgggctttacgttttaa

SEQ ID NO: 71392 - DNA, 1554 bp, Neisseria meningitidis; identical to SEQ ID NO: 55271

SEQ ID NO: 71393 - DNA, 969 bp, Neisseria meningitidis
atgactgccaaacctttttccctcaacctgactaacctcctgctgctggcggtgttgtttgccgtcagcctgtcggtgggcgttgccgatttccgctggtcggatgtgttttcgctgtcggacagccagcaggttatgttcatcagccgcctgccgcgcacgtttgcgattgtgttgacgggcgcgtcgatggcggtggcggggatgattatgcagattctgatgcgtaaccgttttgtcgagccttctatggcgggcgcgggtcagagtgcggctttgggtttgcttctgatgtccctgctgctgcctgccgcgccgctgccggtcaaaatgtcggttgccgccgttgccgcgttaatcgggatgctggtgtttatgctgctgatccgccgtctgccgccgacggcgcaactgatggtgccgctggtggggattattttcggcggcgtggttgaggcagtggcgacgtttatcgcgtatgaaaacgaaatgctgcaaatgctcggcgtgtggcagcagggcgatttttcgagcgtgctgctggggcggtacgagctgctttggattacgggcggtttggcggtgtttgcctatctgattgccgaccggctgacgattttggggctgggcgagacggtcagcgtgaatttgggtttgaaccggacggcggtgttgtggtcggggctgattattgtggctttgattacgtcgctggttatcgttacggtcggcaatattccgtttgtcgggctggtcgtgccgaacatcatcagccgcctgataggcgacaggctgcgccaaagcctgcctgcggtggccttgttgggcgcgtctttggttttattgtgcgacattatcggacgtgtgattgtgtttccgtttgaaattccggtctctacggtttttggtgtgttgggtacggctttgtttttgtggcttttgttaaggaaacctgctcatgccgtctga

SEQ ID NO: 71394 - DNA, 477 bp, Neisseria meningitidis
atggaacacctatttgggaaatggctgcccgacttgcccgccgccatttcagacggcatcagcctgccgatggtgcggctgctgcacacccggtcgctgaccgccgcattgcgcgccttgccgcatacattttcggtggaactgctgaaactgggcgaattggagacggaatgcggagggaggctggtgcgcgaagttttgttgaagctggaccgtatccctgttgttgaggcaaggagcgaatgccgtatcggttcggcgttttggcaaaacattttggactgcggcacgcgtcctttgggcgagcgtctgtttcaagccgatttggaaggggcgcgttcggtgtttgagtttgccgttgccggcgaaggatgcggacggtactttgccgcgcggcgttctcggttttcccatcaaggcgaggaaatgctgctgaccgagtattttctgcccgaactgaaacgctttatcggataa

SEQ ID NO: 71395 - DNA, 987 bp, Neisseria meningitidis; identical to SEQ ID NO: 40869

SEQ ID NO: 71396 - DNA, 1515 bp, Neisseria meningitidis
atgtgttgttctcttagttttgcagaaccagcaagaatagatgatcgaataataaaatttaggccatctaaatcaaagttttttgaatctacaggatatagaaaaatcaataatgaattttctaaattcacagaagcggcaaatgtcgaacatatccccacgggcgcaaaagcccgaatcaacgcaaagataaccgccagcgtatcccgcgccgccgtcttgtcaggagtcggcaaacttgcccgcttaggcgcgaaattaagcacaagggcagttccttatgtcggaacagcccttttagcccatgacgtatacgaaactttcaaagaagacatacaggcacaaggctaccaatacgaccccgaaaccgacaaatttgtaaaaggctacgaatatagtaattgcctttggtacgaagacgaaagacgtattaatagaacctatggctgctacggcgttgacagttccattatgcgccttatgtccgattacagcagattccccgaagtcaaagaattgatggaaagccaaatgtataggctggcacgtccgttttggaattggcataaagaagaactgaataaattaagttctttggattggaataattttgttttaaatcgttgcacatttgattggaacggcggagattgtgtggtcaataaaggtgatgattacagaaatggggctaatttttcccttagccgcaatccgaaatacaaagaagaaatggatgccaaaaagctggaagagattttatcgttgaaagtcgatgccaatcccgacaaatacataaaggcaaccggatatcccggttattccgaaaaagtagaagtagcacccggaacaaaagtgaatatggggcctgttacggacaggaacgggaatcccgttcaggttgtcgcaacattcggcagggattcgcaaggcaacaccacagtggatgttcaagtaatcccgcgtcccgacctcacacccggaagcgcggaagcaccgaacgcacagccgctgcccgaagtatcgcccgccgaaaaccccgcaaacaacccgaaccccaatgagaaccccggcacgagccccaatcccgaacccgaccccgatttgaatcccgatgcaaatcccgatacggacggacagcccggcacaagacccgattcccccgcagttccgggccgcacaaacggcagggacggcgaagacggcggccttttgtgcaaattcttccccgacattctcgcttgcgacaggctgcccgagcccaatccggcagaagatttaaatctgccgtctgaaaccgtcaatgtagagtttcagaaatcaggaatctttcaaaattccgcacagtgtcccgcacctgtcactttcacagtgactgtgcttgattccagcaggcagttcgcgttcagctttgagaacgcatgtaccatagccgaacggctaaggtacatgcttctcgcccttgcttgggcggttgccgcatttttctgtatccgcacagtatcccgtgaagtctag

SEQ ID NO: 71397 - DNA, 1260 bp, Neisseria meningitidis; identical to SEQ ID NO: 39263

SEQ ID NO: 71398 - DNA, 1074 bp, Neisseria meningitidis
atgcgcccgttttgcgtcggcgcgacagtgcttgccatactcggcgcgttggtgtttttcatcagccccggtgtcgtcgtcctgcaccgccaaatcttcttagaactcatgctgcctgcagcatatggtggtttcctgactgcggctttgttggactggacgggtttttcgggcaacctgaaacctgccactactttgatggcggtgttgttgcttgttgcggctgttttattgccgtttttaccgcaacttgccgcattctttgtagcggcttattggctggttttattgctgttctgcgcttggttgatttggctggcccgcaacacggataacttcgccctgctgatgctgcttgccgcgttcaccgtttttcagacggcatacgcggcaaccggcgacttgaacctgttgcgcgcgcaagtgcatttaaatatggctgcggtgatgtttgtttccatacgtgtgagtgttttgctgggcgcggaagcccttaaagaatgccgtctgaaagaccccgtattcatccccaacatcgtctataaaaacatcgccatcaccttcctgctgctgcacaccgccgccgaactttggctgcctgcgcaaaccgccggttttaccgcgcttgccgtcggtttcatcctgctcgccaagctgcgcgaactgcaccatcacgaactcctgcgcaaacactacgtccgcacttattacctgctccagctttttgccgccgcaggctatttgtggacaggtgcggcgaaactgcaaaacctgcccgcctccgcgcccctgcacctgattaccctcggcgacatgatgggcggcgtgatgatggtgtggctgaccgccggactgtggcacagcggctttaccaagctcgactacccgaaactctgcctcatcgccgtcctcctgctctttatggctgccgtctcgcgtgctttcttgatgaacgtgaatccaatattcttcatcaccgtccccgcgattctgaccgccgtcgtgttcacgctttatcttttcacgtttgttccgatttttcgggcgaatgcgtttacgggcgacccggaataa

SEQ ID NO: 71399 - DNA, 837 bp, Neisseria meningitidis; identical to SEQ ID NO: 54374

SEQ ID NO: 71400 - DNA, 1020 bp, Neisseria meningitidis; identical to SEQ ID NO: 54248

SEQ ID NO: 71401 - DNA, 1242 bp, Neisseria meningitidis; identical to SEQ ID NO: 37141

SEQ ID NO: 71402 - DNA, 579 bp, Neisseria meningitidis
atgtcaaacaaaatcaaaatgcttgtcggattgggcaaccccggcaaagaatacgaacaaacccgacacaatgcaggcttttggttcctcgacgaactggcttggaagtggaaggcttcatttaaagaagaaaaaaaattcttcggcgaagtcgcccgtgctaccctgcccgacggcgatgtctggctgctcaagccgaccacgttcatgaaccgttccggacaggcggttgccgcccttgcgcagttttataaaatcaaacccgaagaaatcctcgtcgtccacgacgaactcgacattccctgcggacggatcaaattcaaactcggcggcggcaacggcggacacaacggcttgaaagacattcaggcaaaactcggcacggcagactattaccgtctgcgcctcggtatcggccatccgggcgaccgcaacctcgtcgtcggctatgtcctgaacaaacccagtacggaacaccgccgacagattgacgatgccgtcgccaaatccctgcaagccatacccgacatccttgccgacaaatgtgaagaggcaacccgcttcctgcacagcaaatga

SEQ ID NO: 71403 - DNA, 312 bp, Neisseria meningitidis; identical to SEQ ID NO: 37456

SEQ ID NO: 71404 - DNA, 1251 bp, Neisseria meningitidis
atgaccaaactgacacgaagacaaatcatccgccgcaccgccggcacactgttcgccctaagccccatcgcatccgccgttgccaaaacggtacgcgccccgcaattcaccgccgcacggatatggccgtcgcacacctacacccgcctgacgctggaaagcaccgccgcgctcaaataccagcacttcgcgctcgacaatccgggcaggctggtcgtcgacatacaaaacgcaaacatcaataccgtattgcacggactgtctcagaaggttatggcggacgatccctttatccgcaatatacgcgccggtcagaacacgcccgacaccgtccgcctcgtcatcgatttgaaacagccttcctacgcgcaagttttttccctcccccccgtcggcggctttaaaaaccgcctcgtcgtcgatctctatccgcaagggatggatcccgacgatccgatgatggctctgcttaacggcagcctgaacaaaacccgtcgcggctcccctgaagccgacctcgctcaaaacactcctgcacaaaccgaacgcggcaaaaacgggcgcagacccgtcattatgatcgaccccggacacggcggcgaagaccccggcgccgtcagcccgggcggtttgcaggaaaaacacgtcgtcctctccatcgcccgcgaaaccaaaaaacaattggaagccttgggttacaacgtctttatgacgcgcaacgaagacgtgttcatccctttgggcgtgcgtgtcgccaaagggcgcgcacggcgggcggacgtattcgtctccatccacgccgacgctttcaccagcccctccgcgcgcggaacgggggtctatatgctgaacaccaaaggcgcgaccagctccgccgccaaattcttggaacagacgcaaaacaatgccgacgcggtcggcggcgtaccgaccagcggcaaccgcaacgtcgataccgccctgctcgatatgacccaaaccgccacgctgcgcgacagccgcaaactcggcaaactggtgcttgaagaattgggcaggctcaaccacttgcacaaaggcagggtggacgaagccaatttcgccgttttgcgcgcacccgatatgccgtctatcctggtcgaaaccgccttcctgtccaaccctgctgaagagaagttgctgggcagcgaatccttccgccggcagtgcgcccaatccattgcctcgggtgtccaacgctacatcaatacatccgtattgaagcggggttga

SEQ ID NO: 71405 - DNA, 1638 bp, Neisseria meningitidis; identical to SEQ ID NO: 55319

SEQ ID NO: 71406 - DNA, 2838 bp, Neisseria meningitidis; identical to SEQ ID NO: 60414

SEQ ID NO: 71407 - DNA, 1572 bp, Neisseria meningitidis
atgctgttttcagacggtgtcatttcgcccaagtcgcttgcggcattgattgcgagggtgttcagttattcgattcttgatttgcgtcattatccgcgccacagggtgctgatgggggtgttgacggaggagcagatggtggagttccactgtgtgccggttttccgtcggggcgacaaagtattttttgcggtttccgatccgacacagatgccgcaaattcagaaaaccgtttctgccgcagggattgaggttgagttggtcattgtcgaggatgaccagttggcgggtttgctcgattgggtgggttcgcgttcgacatcgctgcttcaggagcttggggaggggcaggaggaagaggaaagccacaccctgtatatcgacaacgaggaggcagaagacggccctgttccgaggtttatccataagactttgtcggatgccttgcgcagcggggcatcggacatccatttcgagttttacgaacacaatgcccgtatccgtttccgtgtggacgggcagctccgcgaggtggttcagccgcccattgcggtaagggggcagcttgcttcccggattaaggtaatgtcgcgtttggacatttccgaaaaacggataccgcaggacggcaggatgcagctgacctttcaaaagggcggcaagcctgtcgatttccgtgtcagcacattgccgacgctgtttggcgaaaaggtcgtgatgcggattttgaattccgatgccgcgtctttgaacatcgaccagctcggttttgagccgtttcagaaaaaattgttgttggaagcgattcaccgtccctacgggatggtgctggtaaccggtccgacgggttcgggtaagacggtgtcgctctatacctgtttgaatattttgaatacggagtcggtaaatattgcaacggcggaagaccctgccgagattaacctgccgggcatcaatcaggttaacgtcaatgataagcagggtctgacttttgccgctgctttgaagtctttcctgcgtcaggacccggacatcattatggtcggtgagattcgtgatttggaaactgccgatattgcgattaaggcggcacaaacagggcatatggtgttttccaccctgcacaccaataatgcgccggcgacgttgtcgcgtatgctgaatatgggtgtcgcgccgtttaatattgccagttcggtcagcctgattatggcgcagcgtcttttacgcaggctgtgttcgagctgcaaacaggaagtggaacgcccgtctgcctctgctttgaaggaagtcggcttcaccgatgaggaccttgcaaaagattggaaactttaccgcgccgtcggttgcgaccgttgccgggggcagggttataaagggcgtgcgggcgtgtatgaggttatgcccatcagcgaagaaatgcagcgtgtgattatgaacaacggtacggaagtggatattttggacgttgcctataaggagggtatggtggatttgcgccgggccggtattttgaaagttatgcagggcattacttcattggaagaggtaacggcaaataccaacgattag

SEQ ID NO: 71408 - DNA, 258 bp, Neisseria meningitidis; identical to SEQ ID NO: 55346

SEQ ID NO: 71409 - DNA, 534 bp, Neisseria meningitidis; identical to SEQ ID NO: 38370

SEQ ID NO: 71410 - DNA, 1380 bp, Neisseria meningitidis
atggcaaaaacgcttaaaaccctttaccaatgcaccgaatgcggcggcacttccccgaaatggcagggcaaatgcccgcattgcggcgagtggaacacacttcaggaaagcttggccgcgcccgagccgaaaaacgcccgcttccaatcttgggcggcggatacctcgaccgtccaatccctctcctccgtgaccgccaccgaagtgccgcgcaatccgaccggcatgggcgaactcgaccgcgtattgggcggcggtttggtcgatggtgcggtcatcctgctcggcggcgaccccggcatcggcaaatctacgctgctgctgcaaaccatcgccaaaatggcgcaaagccgtaaagtgctatacgtttccggcgaagaatccgcccaacaggtcgccctgcgcgcgcagcgtttggaactgcccaccgaaggcgtgaacctgcttgccgaaatccgcatggaagcgattcaagcagcgttgaaacagcatcagcccgaagtcgtggttatcgattccatccaaaccatgtattccgaccaaatcacttccgcccccggttctgtgtcgcaggtgcgcgagtgtgccgcccaactgacgcgcatggcgaaacagatgggcatcgccatgatactggtcggacacgtgaccaaagacggcgcgattgccggcccgcgcgtgctggaacacatggttgataccgtgctgtatttcgagggcgaccaacattccaactaccgcatgatacgcgccatcaaaaaccgcttcggcgcggcaaacgaactgggcgtgttcgcgatgacggaaaacggtttgaaaggtgtgtccaacccgtccgccatcttccttgccagctaccgcgacgacacgcccggttcgtgcgttttggttacgcaggaaggcagccgaccgcttttggttgaaattcaggcattggtcgatgacgcgcacggattcacccccaaacgccttaccgtcggactggaacaaaaccgcctcgcgatgctgctcgccgtgttaaaccgacacggcggcatcgcctgtttcgatcaggatgtgttcctcaacgccgtcggtggcgtgaaaatcggcgaaccggcggcggatttggcagtcatcctcgcgatgctttccagcttccgcgaccgcccgctgcccgaaaaaatggttgcatttggagaaatcggtttgagcggtgaagtccgccccgtcgcgcgcggacaagagcggctcaaagaagcggaaaaactcggcttcaaacgcgccatcgtccccaaagccaatatgccgcgcaacgccaaagagtttccgaacctgaaaatctacggcgtttcgagtttgcaggaagccattgatatttgtcgggaagatagggattga

SEQ ID NO: 71411 - DNA, 1428 bp, Neisseria meningitidis; identical to SEQ ID NO: 54802

SEQ ID NO: 71412 - DNA, 825 bp, Neisseria meningitidis
atggacggcgcacaaccgaaaacgaatttttttgaacgcctgattgcccgactcgcccgcgaacccgattccgccgaagacgtattaaacctgcttcggcaggcgcacgagcaggaagtatttgatgcggatacgcttttaaggttggaaaaagtcctcgatttttccgatttggaagtgcgcgatgccatgattacgcgcagccgtatgaacgttttaaaagaaaacgacagcatcgagcgcatcaccgcctacgtcatcgataccgcccattcgcgcttccccgtcatcggcgaagacaaagacgaagttttgggcattttgcacgccaaagacctgctcaaatatatgttcaaccccgagcagttccacctgaaatccgtcttgcgccctgccgttttcgttcccgaaggcaaatctttgaccgcccttttaaaagagttccgcgaacagcgcaaccacatggcgattgttatcgacgaatacggcggcacgtcgggtttggtcacctttgaagacatcatcgagcaaatcgtcggcgaaatcgaagatgagtttgacgaagacgacagtgccgataatatccacgccgtttcttccgaacgctggcgcatccacgcggctaccgaaatcgaagacatcaataccttcttcggcacagaatacagcagcgaagaagccgataccatcggcggcctggtcattcaagagttagggcatctgcccgtacgcggcgaaaaagtccttatcggcggtttgcagttcaccgtcgcccgcgccgacaaccgccgcctgcacacgctgatggcgacccgcgtgaagtaa

SEQ ID NO: 71413 - DNA, 621 bp, Neisseria meningitidis
atgctgaaacaggctgtaacaggtatgaccaagcaagagcgcatcacgacgcaagcctacaatgagatgaccaaatccgtggcaggttcaaacagcatagtccttaacgatgtccaaggcgatacgaccatcaacaaccatcatacgcatacgcacaaccacagcgatgccgatggcaaagcactgtcgatgaggctcacatcccgtcctttgttgtcagaccgtcaggcggcggctttcgcccgtacaggcaaactcacgggcagtttcgacctgtttgcttcggtggtcgccccctcgcagtacacgtttgccgttgccatgcccgacacgtccatgtcgccggttatcgaaaagggagacttgctggtggtcgagccgcgtatgtgccctgcggacgaagacatcgcgctgattgaactgtccgacaagcggctggtcgtcgcgcaccttgttatcgatattgcgggcaggatgctgatttatcagacgggcaggccgtctgaagcctttgacctgcccgaaggcagcacgattttaggtgtggtgctggaggtcaaaaaacggtttatgtccgccgcacaggcgagaaggcgtgttgattcggattaccacccctga

SEQ ID NO: 71414 - DNA, 471 bp, Neisseria meningitidis; identical to SEQ ID NO: 39685

SEQ ID NO: 71415 - DNA, 168 bp, Neisseria meningitidis
atgtttgccaaacattatcaattcatcgcactcggcatcatactgcttctttatatgttgattctctatacgaccgatttttccaatctgacgtattggatgctgttttttatctgttttattacaggaaaaatattagctcgtttgttagagaaaagctttaaataa

SEQ ID NO: 71416 - DNA, 2208 bp, Neisseria meningitidis
atgtttcccgaccaatccgcccccaacctcctgcaaggcttgaatcccgaacaactctccgccgtaacctggccgccgcaatccgcccttgtgctggcaggcgcgggcagcggcaaaacgcgcgtgctgaccacgcgtatcgcatggcttttgcaaaccggtcaggcaagcgtgcacagcattatggcggtaacgtttaccaacaaagccgccaaagaaatgcaaacccgactcggcgcgatgattcccgtcgacgtccgcgctatgtggctcggcacgttccacggcctctgccaccgctttctacggctgcaccaccgcgatgccggtttgccgtcttcctttcaaatcctcgacggcggcgaccagctttccctcatcaaacgcctgctcaaaagcctcaacatcgccgaagaaatcatcgcgccgcgttcgctgcaaggctttatcaacgcgcaaaaagaatccggtttgcgcgcttccgtcttgagtgcgcccgatccgcacacaagccgcatgattgaatgctacgccgaatacgacaaaatctgccaacgcgaaggcgtggtcgattttgccgaactcatgctccgcagctacgaaatgctgcaaagcaacgaaatcctgcgccagcattaccaaaaccgcttcaaccacattctcgtcgacgagttccaagacaccaacaaactgcaatacgcctggctcaaactcatggcgggcggaaacgcagcggtatttgccgtcggcgacgacgaccaaagcatttaccgtttccgtggcgcaaacgtcggcaacatgaccgcgctgatggaagaattccacatcgacgcgcccgtcaaactcgaacaaaactaccgctccgtcggcaacatccttgccgccgccaatgccgtgattgaaaacaacgacgaacgactcggcaaaaacctgcgcaccgacgccgaagcaggcgacaaaattcgctactactccgcctttaccgacctcgaagaagcccggttcatcgtggacgaaaccaaagccctcgaacgcgaaggctgggatttggacgaaatcgccgtcctctaccgtagcaacgcccaatcccgcgttatcgaacaaagcctgttccgcagcggcatcccctacaaaatctacggcggcttgcgcttttacgaacgccaagaaatcaaacacgccctcgcctacctgcgcctcgccgtcaatcccgacgacgacaacgccctcttgcgtgtcatcaacttcccaccgcgcggcatcggtgcacgtaccgtcgaaaatcttcagacggcctcaaacgaacaaggcatcaccctctggcaagccgcctgcaacgccggcgcgaaagccgccaaagtcgtcgccttcgtccgcctgattgaagccctgcgcaaccaagtcggacaactgtccctgtccgaaatcatcgtcggcatcctcaaagacagtggcttgaccgaacactaccgcacccaaaaaggcgacaaccaagaccgtctcgacaaccttgacgaactcgtcaacgccgccatcgagttcaaacccgaagacagcaacttcgaaatcctgcctgaaaacatttcagacgatcccgccttccccatcctcgctttcttgagcaacgccaccctcgaatccggcgaaaaccaagcaggcgtgggcgaaaaagccgtccaactcatgaccgtccacgccgccaaaggcttggaattcaacgccgtcttcctcaccggtatggaagaaggccgtttccccagcgaaatgagccttgccgaacgcggcggcctcgaagaagaacgccgcctcatgtacgtcgccatcacccgcgcccgcaaacgcctctacatcaccatggcgcaacaacgcatgctgcacggacaaacccaattcggcatcgtctcccgcttcgtcgaagagatcccacccgaagtattgcactacctgtccgtcaaaaagcctgcctacgacagttacggcaacacgcgccaaaccgccgcatccaaagacaaaatcatcgacgactacaaacagccccaaacctacgcaggtttccgtatcggacaaaacgtccgccacgccaaatttggcaccggcgtgattatcgatgccgcagataaaggcgaatccgcccgactgaccatcaacttcggcaaacagggcgtgaaagagttggataccaagtttgcgaaattggaagcgatgtaa

SEQ ID NO: 71417 - DNA, 471 bp, Neisseria meningitidis; identical to SEQ ID NO: 62004

SEQ ID NO: 71418 - DNA, 1881 bp, Neisseria meningitidis; identical to SEQ ID NO: 47271

SEQ ID NO: 71419 - DNA, 1185 bp, Neisseria meningitidis
atgggcaaacatattcttttaggtgtaacgggcagtattgcggcgtataagtcttgcgagttggtgcgactgctgaaaaaacaggggcattcggttacggtggttatgagccgctcggcaactgaatttgtttctccgctgacttttcaggctttaagcggcaatcctgtcctgaccgacacgcacggcggcaacggttcaaacggtatggaacatatcaacctgacccggaatgcggatgtttttctgattgcgccggcaagtatgaataccgtggcaaaaatctgtaacggcgtggcagataacctactgaccagtctggcagccgcacggaaatgtccgcttgccatcgctcccgcgatgaatgtggaaatgtggctcaaccctgccaaccaacggaatatcgcacaactggtttcagacggcattactgtctatatgccgggcttgggcgaacaggcttgcggagaaaatggcatgggaaggatgccggaacctgccgaattgctggatttgcttccggacttgtggacaccgaaaattttaaggggcaagaaaatcttgattaccgcaggtgcgacatttgaagccattgaccctgtcaggggcatcacaaatacctccagcggaaaaatgggggtagctttggcgcgggcgtgccgtgccgccggtgcggaagtcagcctgattcacggacagcttcaaaccgcgctgcctttcggcatatccgatacggttcaagccgtcagcgctgaagatatgcatcgcgcagtgcatcgtttaatcgacaaacaagatgcttttatttctgttgccgccgtctcagactataaggttaaaaacaggagtacgcaaaaattcaaaaaagataaaaatgccaaaccattatccatcgaattggatgagaaccccgatattttggcttctattgcctcattgccgaacccgccgttctgcatcggttttgccgctgaaacggagaatgtaatggcatatgcgcgagaaaaacgtattaagaaaaaaataccagtgatcgttgccaatgatgtttcaatcgcgatgggcaaaccgaccaaccggattaccattatcggggacgacgaggaactgtcttttcccgaaacaagtaaagatgaagcggcaatgcagattgttgaaaggcttgccgtatatttgaacaaataa

SEQ ID NO: 71420 - DNA, 753 bp, Neisseria meningitidis
atgtcttcaaataaagcttcattttttacacgtctgcgccgcttgtgccgcttgacggtctggctattcaaaaccggcaaaaacctgcgcggtattgacggcggctgccccgagtcgcgcaatcgggcggtaatcgagttgggcaggggggctctgacggctttggatatcggattggaggtgggcaggcccgcacccgaacatccgaacggtgtcttggttgccgccaaccacgtgtcctggctggatattttcgcgatgagcgcggtttatccgagcagctttatcgccaagcaggaaatcaaaagctggccggtattgggcaagatggggcagaacgcgggaacggtgttcatcaaccgcaattcgcggcgcgacatcgaaccgattaaccgcgccgtctacgaaaccttgcaacgcggtcaaaacgtcagttttttccccgaagcgcggacttcctccggactggggctcctgccgttcaaagccgcgctgttccaatccgccattgatgcgggggcaaagttttggcggtcgcgctgcgttattatgacgaaacgggaaaaggacggctcgtccctcatatgccgatgtcgtttgccgacctgcctgtggcgcattgtgtctatgaaaaattacgataaagtcgatttcgtttgcgtggcgatgcgcgaaagcgagaccgtatgctttaaagataaatcgaagaagcatccgtgccgtgtcgccgacgatgcggatatcgctgtctga

SEQ ID NO: 71421 - DNA, 354 bp, Neisseria meningitidis
gtggacaaaatttgtgttaccgaacaagatgtgaacattttggcatccgaccgaaattatgaattaaatattgaaatatttattgacaatataattcattttcaaataacggatgaatcttataaagtaaaattttcagaatatttatttgaaaataaagaaaaaaatgattgggatagaaatcctgctataaattattttttcgagataatagatgatagttatatggactggttgaaagaagaaagttttgatttttttgaaaagaaatattataaggcttatattttcttttttagcgattctgtaatagaagttatcagctcgacagaacctgtattttattcaaaataa

SEQ ID NO: 71422 - DNA, 1512 bp, Neisseria meningitidis
atgagcgaacaaaaccatccgcaaaccgagccgcagttggacgaaaaccaaatcatcgccctgcgccgcgaaaaactgcacaacatccgccaacagcgcaacgcctaccctaacgatttcaaacgcgacagctttgccgccgacctgcatacccaatacggtgaaatcggcaaagaagaactcgacccgcaaggcattcccgtcaaaattgccggccgcatgatgctcaaacggcaaatgggcaaggcgagctttgccaccattcaagacgtgtccgggcaaatccagctttatctgaacaacaaaggcgtgagccaagaaattttggacgacttcaaccattgggacttgggcgacatcgtcggtgcggaaggcactttgttcaaaaccaaccacggcgaactgaccgtacgcgtgtccggcatccgcctgctgtccaaatccctgcgtccgctgcccgacaaacacaaaggtttgagcgatcaggaaaccaaataccgccaacgctatgttgatttgattgccaacggagaatcgcgcaataccttcatcaaacgcagccaaatcatccaatccgtgcgtaattttatggtgggcgagcattatctcgaagtcgaaaccccgatgatgcacccgattcccggcggcgcgacggcaaaacccttcgttacccaccacaatgccttggacattccgctctacctgcgcatcgcccccgagctgtatctgaaacgcttggttgtcggtggtttggaacgcgtgtttgaaatcaaccgcagcttccgcaacgaaggtatgtctgtgcgccacaatcccgaatttacgatgattgaattttacgaagccttctccgactacgaacgcatgatgcaaatggcggaagacatcatccgcaacgcatcgcgcacggtaaacggcacggcaaaaatcagctacaacggcaaagaagtcgatttggaaagcccgtttgaacgcctgaccattctcgaagccatcaaaaaatacaatccgcactacaccgacgagcagttgaacgatgcggaatggctgaaaaaagaaatcgtcaaacacggcgaaagcctgccgccgtccccgggcatcggcagcctgcaacttgccctgtttgaaggttgcgccgaaggcaaactgtggaacccgaccttcatcgtcgattatccggtcgaagtttccccgttggcgcgcgcttcggataccaaacaaggtctgaccgaacgtttcgaattgttcgttgtcggccgcgaactggcaaacggctattcagaattgaatgaccctgaagaccaagccgaacgcttcaaatcgcaagtcgcacaaaaagacgcgggcgacgacgaagccatgcattacgatgccgactacatccgcgcgatggaatttggtttgccgccgaccggcggttgcggcatcggtatcgaccgcttggtgatgttgctgaccgattcgcaaaccatccgcgatgtgattctgtttccgcagatgcgccccgagtag

SEQ ID NO: 71423 - DNA, 624 bp, Neisseria meningitidis; identical to SEQ ID NO: 36421

SEQ ID NO: 71424 - DNA, 300 bp, Neisseria meningitidis
atgaagaaaatgttcgtgctgttctgtatgctgttctcctgcgccttctcccttgcggcggtaaacatcaatgcggcttcgctgcaggagttggaggcgctgccaggcataggcccggcgaaggcgaaggccattgcggaataccgtgcgcaaaacggtgcgttcaagtctgtagacgatttgaccaaggtaaagggcatcggccctgcggtgctggcgaagctgaaggatcaggcttccgtcggcgcgcccgcaccaaaaggcccggcaaaaccggctataccggccgctaaaaaatag

SEQ ID NO: 71425 - DNA, 312 bp, Neisseria meningitidis; identical to SEQ ID NO: 66560

SEQ ID NO: 71426 - DNA, 1008 bp, Neisseria meningitidis
ttgcataatgcgggtattaagattatagctgcaaatgaattggtgccagaacgtgctaatttatataaagctctatatcccgaaagtaaaatgattataggtgatatacttcatgaggaagtgtttcaaaatttaatacagagcgtgccgaatcgattagattttttaattgcttctcctccttgtcaaggcatgagtgttgcagggaaaaatcgtaacattcaagagatggctaatgataaacgtaatcatttaatattcagagtaatcgaatttattttattaaaacgcccaacttttgttttgattgaaaatgttccattttttttaaaaattaagttaccttataaggggacattacaaacagtagaagtaattttgcaagatttatttggttgcgaatattatattcaaactcatatttttgattctgccgattatggtgttgcacaacatcgtaaacgagctattattcgtatgaataaacattcaactatttggggaatgccggaaaaagttacaaaaaccatttctgttcgtgatgctattagttttttgcctagtattgagtctggacaaaagtctaatgtgaaatggcattttgcacgtacacatgctccggagcacattatatggctaaaaaatacgccaacaggacgatctgcttttgataatatagaacattatccaaagaaaaaaaatggtgaaaaaattaaaagttataatacaacttatcgccgtatggagtgggatgctcctgccccaactattactattcgtaatgacgctatcagttcacaattaaatgttcatcctggacggtctatgcctgatggaacatattcagatgcaagagttttaacaccattagagttaatgcttttaacatcattacctattgattggaatattcccgacgatacatcagaattattaattcggcaatgtattggtgaatctattcctccattgttaattaaaaaaattgtagagagaataggaaaatag

SEQ ID NO: 71427 - DNA, 186 bp, Neisseria meningitidis; identical to SEQ ID NO: 37303

SEQ ID NO: 71428 - DNA, 1302 bp, Neisseria meningitidis
atgaccgaatccctccgcctccctgccgcctcgctcaaaccttccactgtcgccctgcccggctccaaaagcatcagcaaccgcaccctgctgcttgccgccttgtccgacaatgcttgcgaaatccattccctgctcaaatccgacgataccgaccgtatgctcgaagcactcgataaactcggcgttgaaatcgaatatcttgccgaagaccgtctgaaagtgcacggcacaggcggacgcttccccaaccgcactgccgatttgtttttgggcaacgcgggcacggcgttccgcccgctgaccgccgcgcttgccgttttgggcggcgattatcgcctgcacggcgttgcgcgtatgcacgaacgccccatcggcgatttggccgatgcactgcggattgccggcgccgatgtcgaatatctcggcaaggaacactatccgccgcttcatatcggcgaacgccaagacaacggcgagcgcgtgattccgattaaaggcaatgtatccagccagtttctgaccgcccttttaatggcgttgccgctgaccgggcaggcgtttgaaatccgtatggtcggcgagttaatttccaagccctatatcgacattactttaaaactgatggcgcaattcggcgtacaggttatcaatgaaggctaccgcgtcttcaaaattcccgccgatgcgcactaccacgcgcccgaacacttgcacgtcgaaggcgatgcctccagcgcgtcctacttcctcgcagccggtttgattgccgccacgcccgtctgtgttatcggtatcggcgcaaacagcatacagggcgatgtcgcctttgcccgcgagctggaaaaaatcggggcggacgtggtttggggcgaaaacttcgtcgaagtctcgcgcccgaaagaacgtgccgtccaagcctttgatttggatgcaaaccatatccccgatgccgccatgaccctcgccgtcgtcgcgcttgctacagggcaaacctgcacgcttcgcaacatcggttcgtggcgcgtcaaagagaccgaccgcattgccgcaatggcgaacgagttgcgcaaactcggtgcaaaagtcgccgaagaagccgaagcaattcacatcaccccgcccgaaacgccgacacccgacgccgtcatcgacacttacgacgaccaccgcatggcaatgtgtttctcgctggtttcgctgttggacgtacccgtcgtcatcaacgatccgaaatgcacccacaaaaccttcccgacttatttcgacgtgttctcatcgctgaccgaaacagcggaataa

SEQ ID NO: 71429 - DNA, 2664 bp, Neisseria meningitidis
atgtccacccaattacacgatgttgaccctatcgaaacccaagagtggctggacgcgttaagctccgtcctcgaatatgaaggcggcgaacgcgcgcaatacctcttggaaaacctggtcaaatactgccgcgacaagggcgtacgtatgccacacggcacgaccaccccgtatttgaataccgtttcggttgaaaacgaaaaaggcattccgggcgaccaaaacatcgaacaccgcatccgcgcattcgtgcgctggaacgccgccgccatcgtattgcgcgccggcaagaaagatttggaactgggtgggcacatcgcatctttccaatctgccgccaccatgtacgaagtcggtttcaaccacttttggaaagccaaaggcgaaggcgaagaaggcgatttggtcttcttccaaggtcacgtcgccccgggcatctatgcacgcgcattcgtcgagggccgtctgaccgaagaccagctgaacaacttccgccaagaagtggacggacacggtctgccttcctatccgcacccccacctcttgcccgacttttggcagttcccgaccgtatccatgggcttggggcccatcatggcgatttatcaggcgcgtttcctgaaatacttggaatcgcgtggtttggcaaaaaccaaaggccgtaaagtatggtgtttctgcggcgacggcgaaatggacgaacccgaatctcaaggtgcaatcgcactggctgcacgcgaaggcttggacaacctgattttcgtcatcaactgcaatctgcaacgcttggacggtccggtacgcggcaacggcaaaatcatccaagaattggaaggcaactttgccggcgccggctggaatgtcgtcaaagtcatttggggccgccgctgggaccgcctcttggcgaaagacaaagacggtatcctgcgccaacgtatggaagaatgtttggacggcgactaccaaacttacaaatccaaagacggcgcgtatgtgcgcgaacacttcttcaatacgcccgaactgaaagcattggttgccgatatgaccgatgagcaactctgggcattgaaccgcggcggccacgacccgcaaaaagtgtacaacgcctacgaccgcgcagcgaaccatgccgacggcaaacctaccgtcatcttggcgaaaaccattaaaggttacggtatgggcgcatccggcgaaggtcagaacgttgcccaccaagccaaaaaaatggacaaagcgtccctgaaacaattccgcgaccgctttgacattccggttaccgacgaacaaatcgaaagcggcgatctgccttacctgacttttgcccccgatacggaagaatacaaatacctgcacgcacgccgcgatgctttgggcggctacctgccgcaacgcaaaccgacgcaggaagtattggaagtgcccgagctgtcagcattcgacgcacaactcaaatccagcggtgaacgcgagttctcgaccacgatggcattcgtccgcatcctgtccactttgctgaaagacaaaaaaatcggcaaacgcgtcgtacctatcgttcccgacgaaagccgtactttcggcatggaaggtatgttccgccaatacggtatttggaatccgaaaggtcagcaatatacccctcaagacaaagaccaactgatgttctataaagaatccgttgacggtcaaatcttgcaagaaggtattaacgaaccgggcgcgatggccgactggattgcggctgcaaccagctacgccaacagcaacttcgccatgattccgttctacatttactattctatgttcggtttccaacgtatcggcgacttggcttgggcggcgggcgatatgcacgcgcgcggcttcctgctgggcggtactgccggccgtacgacgctgaacggcgaaggcctgcaacacgaagacggccacagccacatccaggccgacctgattccgaactgcgtatcttatgacccgactttccaatacgaagtcgccgtcatcgtacaagacggtctgcgccgtatgtatgccaataatgaagacgtgttctactacatcaccctgatgaacgagaactacacccatccggatatgcccgaaggtgcggaacaagacatcttgaaaggtatgtacctgctgaaagtcggcggcaaaggcgacaagaaagtccaactgatgggttccggtacgattttgcaagaagtgattgccggtgccgaactgctgaaagccgacttcggcgtggaagcagacatttggtcttgcccatccttcaacctgctgcaccgcgacgctgtcgaggtagaacgcttcaaccgcctgcatccgctggaagccgaaaaagtacctttcgttacttccaaattgcaaggtcatgacggtccggttattgccgctaccgactatatccgcagctatgctgaccgtatccgcgcctacatcccgaacgactaccacgtcttgggtactgacggcttcggccgctccgacagccgcgccaacctgcgccgcttctttgaagtggatcgctacaacgttgccgtggccgcattggccgcattggcggaacaaggcaaagtcagcaaagaaaccgttcaacaagccattgagaaatacggcatcaaagccgattcagctcctagctggaaacgctga

SEQ ID NO: 71430 - DNA, 465 bp, Neisseria meningitidis
atgaaatgcccgttttgcgcccaccccgacacccgcgttgccgattcgcgcctgatggacgaacgcaacgccgtccgccgccgccgccactgccccaactgcggcaaacgcttcggcacgctcgaaaccgccgaactcaaaatgcccgccgtcatcggtccggacaaaaaacgttcgccctttaatgcacaacgcctccgcaacgacctgaccgccgccgcccgaaaatccgccctgacacccgaacagatcgacgaaaccgtccgcctgacggaacacaggctctacacttcgggtcttcgcgacatcccctctgccgaacttgccgacatggtgctaaaagagctgcttgagcacaacacggaagccgccgtccgtttcgccgccctgcacaaacgcttcgacaatccggcagactttgcctcgtggctggcgcaagccgtcaaaacaggcggcaaagcctga

SEQ ID NO: 71431 - DNA, 489 bp, Neisseria meningitidis; identical to SEQ ID NO: 54373

SEQ ID NO: 71432 - DNA, 876 bp, Neisseria meningitidis
atgttacaaggtagcctggttgccctgattaccccgatgaatcaagacggcagcatccattacgaacaactccgcgatttgatcgactggcacattgaaaacggcacggacggcatcgttgccgtcggcacgacaggcgaatccgccaccctctccgtcgaagaacacaccgccgtcatcgaagccgtcgtcaaacacgttgccaaacgcgtccccgtcatcgccggcacaggggcaaacaacaccgtcgaagccatcgccctttcccaagccgccgaaaaagccggtgcagacttcactctctccgtcgtcccctattacaacaagccctcccaagaaggcatttaccaacatttcaaaaccatcgccgaagccacttcgattccgatgattatctacaacgtgcccggccgtaccgtcgtcagcatgactaacgacactatcctgcgccttgccgaaatccccaacatcgtcggcgtgaaagaagccagcggcaacatcggcagcaacatcgaactcatcaaccgcgcgcccgaaggcttcgtcgtcctttccggcgacgaccataccgccctgccgttcatgctgtgcggcggacacggcgtgattaccgtagccgccaacgccgcacccaagctctttgccgatatgtgccgcgccgcgctgcaaggcgacattgccctcgcacgcaagctcaatgaccagctgattccgatttacgacaccatgttctgcgaacccagccccgccgcaccgaaatgggcggtatccgccctgggcagatgcgaaccgcacgtccgcctgccgctcgttccgctgacggaaggcggacaggcaaaagtccgcgccgccctgaaagcctcaggacaactctaa

SEQ ID NO: 71433 - DNA, 822 bp, Neisseria meningitidis; identical to SEQ ID NO: 55883

SEQ ID NO: 71434 - DNA, 525 bp, Neisseria meningitidis; identical to SEQ ID NO: 61838

SEQ ID NO: 71435 - DNA, 480 bp, Neisseria meningitidis
atgagcaccttcttccagcaaaccgcccaagccatgattgccaaacacatcaaccgcttcccgctattgaagttggaccgggtaattgattggcagccgatcgagcagtacctgaaccgtcaaaaaaaccgttaccttagagaccaccgcggccgtcccgcctatcccctgttgtccatgttcaaagccgtcctgctcggacaatggcacagcctctccgatcccgaactcgaacacagcctcatcacccgcatcgacttcaacctgttttgccgttttgacgaactgagcatccccgattacagcaccttatgccgctaccgcaactggctggcgcaagacgacaccctgtccgaattgctcaaactgattaaccgccaactgaccgaaaaaaacctaaaagtagagaaagcatccgctgccgtcgttgacgccaccattattcagaccgccggcagcaaacagcgccaggcccgataa

SEQ ID NO: 71436 - DNA, 780 bp, Neisseria meningitidis; identical to SEQ ID NO: 38358

SEQ ID NO: 71437 - DNA, 993 bp, Neisseria meningitidis; identical to SEQ ID NO: 55577

SEQ ID NO: 71438 - DNA, 1326 bp, Neisseria meningitidis; identical to SEQ ID NO: 54473

SEQ ID NO: 71439 - DNA, 525 bp, Neisseria meningitidis; identical to SEQ ID NO: 39459

SEQ ID NO: 71440 - DNA, 1233 bp, Neisseria meningitidis; identical to SEQ ID NO: 55238

SEQ ID NO: 71441 - DNA, 1101 bp, Neisseria meningitidis; identical to SEQ ID NO: 61524

SEQ ID NO: 71442 - DNA, 516 bp, Neisseria meningitidis; identical to SEQ ID NO: 55128

SEQ ID NO: 71443 - DNA, 588 bp, Neisseria meningitidis; identical to SEQ ID NO: 43205

SEQ ID NO: 71444 - DNA, 657 bp, Neisseria meningitidis; identical to SEQ ID NO: 54614

SEQ ID NO: 71445 - DNA, 2157 bp, Neisseria meningitidis
atgcctgtccctcaacccaccgcaccttacgaccctctgaccgccgaagcgcgtaccctgcttttccatacagcctcctacctcaagcccgaggaacaggcggagcttgaaaaagccgtcgcctatgcgtttcgcgcccacgacgggcaaacccgcaaaagtggcgaaccatacattacgcatccgattgccgttgcgacacagcttgcggtttggcatatggacgtacagggtctttgtgcaggtgtaatgcacgacgtattggaagatacgggcgtgacaaaaggggaaatggcggcggtgttcggcaatacgattgccgagatggtggacgggctgtccaaactcgaaaaactcaaatttgaagatcatgcggaacatcaggcggagagtttccgcaaactgattttggcgatgaccaaagatgtgcgcgtcatcgtcgtcaaacttgccgaccgcctgcacaatatgcggacgctcggttcgatgcgcccggacaaacgccgccggattgcaagggaaacccttgaaatctatgcacagattgccaaccgtataggtttgaataacgcatatcaagagcttcaggatttatcgttccaaaacctgcatcccaaccgctacgagactttaaaaaaagcgatggacaagagccggaagaaccggcaggacgttgtcggcaaagtcttgcgcgcattcggccagcggctggtaggcgcgaatatagaggccaaaatcaaaggcagggaaaaaaacctgtacggcatccatcagaaaatgatggcgaaaaagctgcgctttgccgaggttatggatatttacggtttccgcgtcattgtcaacagcattccagcctgttatgccgcactcggcgcattgcacaccctctatcagcccaagcccgggcggttcaaagactatatcgccattccgaaaagcaacgggtatcaaagtctgcatacgactttggtcggcccttacggcttgccgattgaagttcagatacgtaccaaggaaatggatgctgttgccgaaggtggaatcgccggacattggagctataaatcatattctaagatggtcgatcaggcggtgcttcacacaaaccggtggctgaaaaatatcttagatttgcaggcaagcagtgccaatgccattgagtttctcgaacacgtcaaagtcgatttgtttccgaacgaaatctacatccttacgccaaaaggaaaaatcctaactttgcccaaaggggcaacgcctgtcgattttgcttatgcggtgcataccgatatcgggcacaaaaccgttgccgcacgtatcaacaatatcatgatgccgttgcgtacgaagctcaaaaccggcgattccgtcgaaattattacatccgaacatgccaaacccaatcctgcatggttgaatttcgccgtgtcaggcagggcgcgcagtgccatacgccaatatattaaaaaccttaaccggcacgatgcggtcgttttgggagagagcctcttacaaaaagccctgtccagtttgctgcccaaagatgtcctgctttcagacggcattaaagaaaaataccttgccgatctcaacgacaaacagacttcatttgaggaagtgctgtacaacgtcggtatggggcataccctgcctgtttatgtcgccatgcacattgccgagttggcaggggagcatttcggcagcgaggtcaggctcagttccattaaagttgatggtcaggaaagcgggcatattcattttgcagagtgctgccatccggttcccggcgattccatccgtttgctgttggttaagggaaaaggcatgattatccatagggatacctgcccgacgttgttaaagtccgatcccgaacagcagctggatgcagactgggaaaatatgaacgggcagaactaccgtgtcgggcttcaagtccaatcggaagacagccacggcttgctggcattaatggcgcaagcgatttccgattccggtgcggacattgagtcggtcgaaacaccgtctaaatcccagtcgggaacggaaggttttgtcgaattcaaattcttattgaaagtcaagaatctgaatcaattgaatcagattattcaaaatctgcatagtattccatatatccgcaaagtcatcagaagttga

SEQ ID NO: 71446 - DNA, 1866 bp, Neisseria meningitidis
gtgctgaagacaccccctacgcttgctgcagaactttcgggtaaaaccggtgtgagcattagcgcaccgtatgccaatgagaacagccgcatcagtctgagtgcggcaaacatcgaagctgaaaacggcaaaatcaaaattcaatcttacggtgaccaatattactatgcgagacagagcgaactctatacctttgaacgccgcagctacaaaactggcaaatggtacaaccgcaaacacattaccgaagtcaaagaacacaaaaacgccaagcccgacgcagtaaacctcagcgcatcccaaggcatcgacatcaaatctggtggcagcatcgacgcctacgccaccgcattcgatgcccccaaaggcagcattaacatcgaagccgggcggaaattgacactctatgccgtagaagagctcaactacgacaaacttgacagccaaaaaaggcgcagatttctcggcatcagctacagcaaagcacacgacaccaccacccaagtcatgaaaaccgcgctgccctcaagggtagttgcagaatctgccaatctgcaatcaggctgggataccaaactgcaaggcacacagtttgaaaccacactgggtggcgcaaccatacgcgcaggcgtaggcgagcaggcacgggcagatgccaagattatcctcgaagggatcaaaagcagcatccacacagaaaccgtgagcagcagcaaatctactctatggcaaaaacaggcaggacggggcagtaacatcgaaaccttgcaattgccgagtttcaccggtcccgttgcgcccgtactgaccgctcccggcggctatatcgtcgacattccgaaaggcaatctgaaaaccgaaatcgaaaagctgtccaaacagcccgagtatgcctatctgaaacagctccaagtagcgaaaaacgtcaactggaaccaggtacagctggcgtacgacaaatgggactataagcaggaaggcttaaccagagccggtgcagcgattatcgcgctggctgttaccgtggttactgcgggcgcgggagtcggagccgcactaggcttaaacggcgcagccgcagcagcggccgatgccgcctttgcctcactcgcttctcaggcttccgtatcgctcatcaacaataaaggcgatgtcggcaaaaccctgaaggaactgggcagaagccgcacggtaaaaaatctggttgtagcggcggcaacggcaggcgtatccaacaaactcggtgcctcttcccttgccacttggagcgaaaccccttgggtaaacaacctcaacgttaacctggccaatgcgggcagtgccgcgctgatcaacaccgctgttaacggcggcagcctgaaagacaatctggaggcaaatatcctggcggcattggtgaataccgcgcatggggaggctgcgagtaagattaagcaattggatcagcactatatcgcccacaaagttgcccatgccgtagcaggctgtgcagctgcggcggcgaataagggcaagtgtcaggacggcgcgataggagcggcggtcggtgaaatcctcggcgaagccctactggacggcagagaccctagcagcctgaatgtgaaggacagggcaaaaatcattgctaaggcgaagctggcagcagggacggttgcggcgttgagcaagggggatgtgaatgctgcggcgaatgcggctgctgtggcggtagagagtaatgcgcttagcaaggaaagaatggataaattgacaaaatgcctttccggtaaaacttgttctactacgatggaaaaagtaaatgccatcaaaaaggatgaacaatttagcaaagtaattgatacggaaattcaaaaaagtctgttctag

SEQ ID NO: 71447 - DNA, 345 bp, Neisseria meningitidis; identical to SEQ ID NO: 54259

SEQ ID NO: 71448 - DNA, 3201 bp, Neisseria meningitidis
atgcgaacgaccccaaccttccctacaaaaactttcaaaccggctgccatggcgttagctgttgcaacaacactttctgcctgcttaggcggcggcggcacttctgcgcccgacttcaatgcaggcggcaccggtatcggcagcaacagcagggcaacaacagcgaaatcagcagcagtatcttacgccggtatcaagaacgaaatgtgcaaagacagaagcatgctctgtgccggtcgggatgacgttgcggttacagacagggatgccaaaatcaatgccccccccccgaatctgcataccggagactttacaaacccaaatgacgcatacaagaatttgatcaacctcaaacctgcaattgaagcaggctatacaggacgcggggtagaggtaggtatcgtcgacacaggcgaatccgtcggcagcatatcctttcccgaactgtatggcagaaaagaacacggctataacgaaaattacaaaaactatacggcgtatatgcggaaggaagcgcctgaagacggagacggtaaagacattgaagcttctttcgacgatgaggccgttatagagactgaagcaaagccgacggatatccgccacgtaaaagaaatcggacacatcgatgtggtctcccatattattggcgggcgttccgtggacggcagacctgcaggcggtattgcgcccgatgcgacgctacacataatgaatacgcatgatggaaccaagaacgaaataatgtctgcagccatccgcaatgcatgggtcaagctgggcgaacgtggcgtgcgcatcgtcaataacagttttggaacaacatcgagggcaggcactgccgaccatttccaaatagccaattcggaggagcagtaccgccaagcgttgctcgcctattccggcggtgataaaacagacgagggtatccgcctgatgcaacagagcgattacggcaacttgtcctaccacatccgtaataaaaacatgcttttcattttttcggcaagcaatgacgcacaagctcagcccaacacactgaccctattgccattttatgaaaaagatgctcaaaaaggcattatcacagtcgcaggcgtagaccgcagtggagaaaagttcaatggctccaaccattgcggaattactgccatgtggtgcctatcggcaccctatgaagcaagcgtccgtttcacccgtacaaacccgattcaaattgccggaacatccttttccgcacccatcgtaaccggcacggcggctctgctgctgcagaaatacccgtggatgagcaacgacaacctgcgtaccacgctgctgacaacggctcaggacatcggtgcagtcggcgtggacagcaagttcggctggggactgctggatgcgggtaaggccatgaacggacccgcgtcctttccgttcggcgactttaccgccgatacgaaaggtacatccgatattgcctactccttccgtaacgacatttcaggcacgggcggcctgatcaaaaaaggcggcagccaactgcaactgcacggcaacaacacctatacgggcaaaaccattatcgaaggcggttcgctggtgttgtacggcaacaacaaatcggatatgcgcgtcgaaaccaaaggtgcgctgatttataacggggcggcatccggcggtagcctgaacagcgacggcattgtctatctggcagataccgaccgatccggcgcaaacgaaaccgtgcacatcaaaggcgatctgcagctgggcggcgaaggtacgctgtacacacgtttgggcaaactgctgaaagtggacggtacggcgatgaccggcggcaagctgtacatgtcggcacgcggcaaaggggcaggctatctcaaccgtaccggacaacgtgttcccttcctgagtgccgccaaaatcgggcgggattattctttcttcacaaacatcgaaaccgacggtggtctgctggcttccctcgacagcgtcgaaaaaacagcgggcagtgaaggcgacacgctgtcctattatgtccgtcgcggcaatgcggcacggactgcttcggcagcggcacattccgcgcccgccggtctgaaacacgccgtagaacagggcggcagcaatctggaaaacctgatggtcgaactggatgcctccgaatcatccgcaacacccgagacggttgaaactgcggccgccgaccgcacagatatgccgggcatccgcccctacggcgcaactttccgcgcagcggcagccgtacagcatgcgaatgccgccgacggtgtacgcatcttcaacagtctcgccgctaccgtctatgccgacagtaccgccgcccatgccgatatgcagggacgccggctgaaagccgtatcggacgggttggaccacaacgctacgggtctgcgcgtcatcgcgcaaacccaacaggacggtggaacgtgggaacagggcggtgttgaaggcaaaatgcgcggcagtacccaaaccgtcggcattgccgcgaaaaccggcgaaaatacgacagcagccgccacactgggcatgggacacagcacatggagcgaaaacagtgcaaatgcaaaaaccgacagcattagtctgtttgcaggcatacggcacgatgcgggcgatatcggctatctcaaaggcctgttctcctacggacgctacaaaaacagcatcagccgcagcaccggtgcggacgaacatgcggaaggcagcgtcaacggcacgctgatgcagctgggcgcactgggcggtgtcaacgttccgttttccgcaacgggagatttgacggtcgaaggcggtctgcgctacgacctgctcaaacaggatgcattcgccgaaaaaggcagtgctttgggctggagcggcaacagcctcactgaaggcacactggtcggactcgcgggtctgaagctgtcgcaacccttgagcgataaagccgtcctgtttgcaacggcgggcgtggaacgcgacctgaacggacgcgactacacggtaacgggcggctttaccggcgcgactgcagcaaccggcaagacgggggcacgcaatatgccgcacacccgcctggttgccggtctgggcgcggatgtcgaattcggcaacggctggaacggcttggcacgttacagctacgccggttccaaacagtacggcaaccacagcggacgagtcggcgtaggctaccggttctga

SEQ ID NO: 71449 - DNA, 918 bp, Neisseria meningitidis; identical to SEQ ID NO: 50851

SEQ ID NO: 71450 - DNA, 192 bp, Neisseria meningitidis; identical to SEQ ID NO: 37158

SEQ ID NO: 71451 - DNA, 138 bp, Neisseria meningitidis; identical to SEQ ID NO: 36823

SEQ ID NO: 71452 - DNA, 360 bp, Neisseria meningitidis; identical to SEQ ID NO: 38354

SEQ ID NO: 71453 - DNA, 702 bp, Neisseria meningitidis
atgagcgcgcgcgaaaatattttggcaaaactgaaaaaagccgacgcattgccgatggaagaacctgcggtttttgattattaccgtgaaatgggtgtttcttggggcagcgaagccgagcgtctgaaacattgggctgccgcaatgcgcgcggtcaaaaccgaaatttattgggtgacgaaaagcaattggatgcaggttttccgcgaagcggcagaaggcaagggtttgaaaaacatcctgctgcccttggcgaccgaacacggacaaattgcccgtgccgcattggcggacagcaatatcgaaccgattgccttcgagcgcgaaatcgatacttggaaaaccgagtttttcacgaacatcgatgcgggcttcagcggcgcgcaatgcggcatcgcccgcaccggcacgctgatgctgttttccagccccgaagagccgcgtactttgagtctcgttccgcccgtgcatttctgcctgttcgatacgtccaagatgtacaacgagtttcataatgccgtcgaaggcgaaaaactggtggaaaacggtatgccgaccaatgtattcctgatttccggtccgtccaaaaccgcagacatccaactgacgcttgcttacggcgcgcacggtccgcgtgatttggttatcctcgccatcctgcccgaccacatttcccctaccgatttggaggaaaacgcatga

SEQ ID NO: 71454 - DNA, 513 bp, Neisseria meningitidis; identical to SEQ ID NO: 60409

SEQ ID NO: 71455 - DNA, 447 bp, Neisseria meningitidis; identical to SEQ ID NO: 50949

SEQ ID NO: 71456 - DNA, 285 bp, Neisseria meningitidis; identical to SEQ ID NO: 47739

SEQ ID NO: 71457 - DNA, 1059 bp, Neisseria meningitidis
atgaccgccgccctgcacatcggacacctgtccaaaagttttcaaaacaccccagttttaaacgacatttcgctcagcctcgacccgggcgaaatcctctttatcgtcggcgcgtccggctgcggcaaaaccacccttttacgctgccttgccggttttgaacaacccgattttggcgaaatttcgctttccggcagaaccatcttctcgaaaaataccaacctccccgtccgcgaacgccgtttgggttatgtcgtacaggaaggtgtgctgttcccccacctgaccgtttaccgcaacaccgcctacgggctgggcaacgggaaaggcaagacggcgcaagaacggcagcgcatcgaagctatgttggaattgaccggcatttccgaacttgccggacgctatccgcacgaactttcgggcggacagcaacagcgcgtcgccctcgcccgcgcccttgcacccgatcccgaactgattttgttggacgaacccttcagcgcgctggacgaacagttgcgccgccagattcgcgaagacatgattgccgccctgcgcgccaacggcaaatctgccgttttcgtcagccacgaccgcgaagaagccctgcaatacgccgaccggattgccgtgatgaaacaggggcgcatcctccaaactgcaagccctcacgaattgtaccgacaacctgccgaccttgatgccgccctgtttatcggcgaaggcatcgtgttccccgccgcgctcaacgccgacggcaccgccgattgcggattgggccgcctgcccgttcaaagcggcgcacccgcaggcacacgcggcacactgctcatccgtccggaacagttcagccttcacccccattccgcacccaccgcctccattcacgccgtggttctcaaaaccacgcccaaagcgcggcataccgaaatcagtctccgggtcggacaaaccgtcctcacgctcaacctcccttccgcccccaccctgtcagacggcatttccgccgtcctccatttggacggtcccgccctgttcttccccggaaataccctctga

SEQ ID NO: 71458 - DNA, 1020 bp, Neisseria meningitidis
atgagcgatacccccgctacccccgctacccgcgatttcggcctgatcgacgggcgtgccgtaaccagctatgtgctgtccaatcggcgtggtacgcgtgtctgcgtgctggacttgggcgggattgtgcaggaattttccgttttggcagacggcgtgcgcgaaaacctcgtggtgtcgttcgacgatgcggcttcctatgcggacaatccgtttcagattaacaagcagatagggcgcgtggccggacgcatccgcggtgcggcgttcgacatcaacggcaggacttaccgcgtggaggccaacgaaggcaggaacgcgctgcacggcggttcgcacgggctggccgttacccgtttcaacgcggtggcggcagacggccgttcggtggtgctgcgcagccgcctgcaacagtcggccgacggttatcccaacgatttggatttggatatttcctaccgcttggacgaggacgaccggcttaccgttagctatcgcgccaccgcgctcggcgacacggtgttcgacccgacgctgcacatttactggcggctggacgcgggcctgcacgatgcggttctgcatattccgcagggcggacatattccggccgatgccgaaaaactgcccgtctcaacggtttcagacgacctcgaagtatttgatttcagccggcccaagccgctggatgccgccgttgccgccctgcgccgcgaaacgggtcgggccggttttgacgacgcttaccgcgtgccgtccgatataggccgtcccgccgctgtgttgcaagccggacgccgccgtcgtatcagcatatacagcgaccgcaacggcttggtcatctttaccgccgccccgcaggatttcgcgcggcacgatgcgggcgtttacgacgcgctggcgaccgaggcgcagacgctgcccgacagcctgaattggcccgagttcggcaatattcgtctgaacaagggtgataccagggaggcgacgattgcttacggcatcgaatccctttcttag

SEQ ID NO: 71459 - DNA, 801 bp, Neisseria meningitidis
atgaacgcgttcaaccttatcatcatcggcgacgaaatcttacacggcagccgccaagacaagcatttcgtctttttcaaatccctgctcgaatccaaagggctgaagctcaatcaggtgcaatacctgcccgacgaacctgatttgttggtcaaacaactgcgccgcagcttttcagacggcatgccaactttcgttaccggcggtatcggcgccacgcccgacgaccacacccgccaagccgcagccgctgctttggatttgcccgtcgtccgccacgcgcaagccgccgggtttatcgaaggcgtgacccttaaacgcggtgagccgctcgattcgcccgaacacgcccaacgcctgaagatggcggattttccccaaggcgcggaattggtgcctaatccgtttaataatatcgccggattttccattcgcgagcattatttcttccctggttttcctgtgatggcgcacccgatggcggaatgggttttggatacttattacgccggccgcttcaaccaaaccaaacgcggcagccgcagcgtgtatgtgtttgagcagcccgaatcgcgcattacgccgattatggagcatatcgagcaaacttatctcggggtgcgttcgtacagcctgcccagcgtcggttggacgcattcagacggcacgcaggtcaaaccgcacattgagttcggcatcaaagccgaaggagaagccgtcaaccttttggacgcggcgtgggcggaagtgttgcacagcttggaaggattgggagcagagctgaaaaatcgggtaaactga

SEQ ID NO: 71460 - DNA, 2559 bp, Neisseria meningitidis
atgcctgcaaacctgtcttcagcactggaaaccttcaaacagcagcgcgatgccgccgaagcgcattatttgaaagccaaccgcgtgtcggtatttttcagagaatacacggcggcagtcgaaaccttactggcggcattgtgggcagagtattttcaaaacagcgcgttatgcctgatggcggtaggcggcttcgggcgcggcgaactgtatccctgttcggacgtggatttggcggttgtctcccctgccccgctttcagacggcattcaggaacagattgcccggtttgtccaaaccctgtgggactgcaaactgatgccgtctgtaaaaagcggcagcgttgatgaactatgtgaaagcgtgcgcaatgatattacgggggacacagcgtttttagaggctaggtttttgtttggcaaccgccaaacggtggataaactggcggaaaaaatgaacgcgcagcgcaatgtggcggcgtttgtcgaggcaaaactggtggagatggaacaccgccacgccaaatcgcaaggttcgggggcagtattggagccgaatatcaaaagctgtccgggcggtctgcgcgacatccacaccctgctttggatagcgaaggcgcaaggcttggcgaccgacctgcccgacctgctcaaacagcggattttgacgcgtgccgaagccggtatgctttcgcacggctaccgccgcctcgcccacatccgcatccatctgcatttaaacgccaatcgcgccgaagaccgcctgctgttcgatttgcagccgcaagtcgccgaaagcatgggttatgaaggcttgaacctccgccgccaaagcgaagaactgatgcgcgtgttttaccgcgcgattaaaaccgtcaaacaactgggcggcatcctcacgcctatgctgcaaagccgcgtttcctccaccccgttgcgcgttaccctgcggattgacgacgactacatccaagtcaacaaccaaatcgccgcgcggcacaccgatatttttttcagacggcccgaacacattttcaaaatcgtcgaaatcatgcagcagcgcaacgatattaccgcgctcgaaccgcaaaccctgcgcgcatggtggggcgcgacgcgcaaaatcaaccgcagcttctaccaaaattctgaaaaccgccaccgcttcgccggctttttccgcaacggcaacggactgacccaaaccctgcgcttcctcaacctctacggcgtattgggacgctacctgcccgcgtgggaaaaaatcgtcggcctgctccagcacgacctgttccacatctatcccgtggacgaccacatcctcaccgtcgtccgcaacgtccgccgccttgccttggatatgcacagccacgagctgccctacgcctctgcactgatgcagtcctttgaaaaacaagacatcctctaccttgccgcctttttccatgacatcgccaaaggacgcggcggcgaccatgccatacaaggcatcgcagacgcgcgccaatttgccgctgaccacttcctgaccggagaagaaagcgacctgctcgcttggctggtcgaaaaccacctgctgatgtctgccgtcgcccaaaaagaagacatccaagaccccgacgtactcgatgctttctgcaaacgcgtccaaacccacgaacgcctcagcgcgctctaccttctgaccatttccgacatacgcggtaccaatcccaagctgtggaacgcatggcgcgccagcctgctggaaagcctcttccatgccgccggacgctaccttacaggcaacggcggcaacccgcacaccctcttcggccgccgccggcaggaagccgccgacttactcacccgcgccgccgtccccgaaaaacagcagaaaaaactatggaacgcgctcggttccgcctacttcgcccgccaccagtcccgcgaaatcctgtggcacgccgccaacctcgtacacgattttgaaacccccatcgtccgcagccgcatcctgccccaaagcgacagcttccaagtgatggtctttatgcccaacggcccgcgcctgttcgcccgcctctgccgcatcttcagccgccacggcttcgacattctcgccgcccgcgccttcatcaccgaacacgactacatcctcgacaccttcatcgtgcaaatcccctcgcagcacgctcccgaagactaccccgacattcaaagcgcgctcgaagccgaactcaacagctttatccacggacacaccgttgccgaaatctccagccatagccgccgcatcagccgccgcagccgctatatgccgatcgcgccaagcatcaccatcacccccgaagaagactaccccgattggtactccgtcgaaatcaccgccgtcaaccgccccttcctgctcgccgatatggcggaagtctttttcgcccacaacgtcagcctgcgctatgccaaaatctccacactggatgaacgcgccgaagacagttttaccgtttttagcctagacctgaaaaacccaaaaatccagtcctcattgaagcagacgctgctggaacaattatcataa

SEQ ID NO: 71461 - DNA, 477 bp, Neisseria meningitidis
  misc_feature 8, 9, 10, 11, 12: 'n' is a, c, g or t
gtgtgtgnnnnnttgggcagccaggcaaaaaccattctggtaacgcacctgcaacagaccaaccgcttcaacgtactgaaccgcaccaatttgaacgcattaaaacaggaatccggcatttccggcaaagcgcataacctgaaaggcgcagattatgtcgttaccggcgatgtaaccgaattcggacgcagagatgtcggcgatcatcagctcttcggcatttttggtcgcggcaaatcgcaaatcgcctatgcaaaagtggctctgaatatcgtcaacgtcaatacttccgaaatcgtctattccgcacagggcgcgggcgaatacgcactttccaaccgtgaaatcatcggtttcggcggcacttccggctacgatgcgactttgaacggcaaagttttagacttggcaatccgcgaagccgtcaacagcctggttcaggctgttgacaacggcgcatggcaacccaaccgttaa

SEQ ID NO: 71462 - DNA, 924 bp, Neisseria meningitidis; identical to SEQ ID NO: 63077

SEQ ID NO: 71463 - DNA, 636 bp, Neisseria meningitidis
ttgaacatcaaatattcgggcatcgaaaacaggtttgaaaccgccatcctgaagaaaaacggcgtaagatccggcttcgtctccttcgcccccaaccttgccgccgtcaaactgaacgattatgccaaagttagaaaacggattaccaaaaccaaacagaaagccgacatcgtcattgtgatgttccacggcggcgcggaagggaaacaggcggaacacctgccgttcgataccgaaatcttctatggggaaaacaggggcaacgtcgttgagtttgcgcggcttgccgtcgattccggcgcggatgtcgtattcgggcaggggccgcacgttactcgcgccgtcgaactttaccgcgaccgcttcatctcctacagcggcggcaactttgccacctacggcgcaatcaacacctccggcatcagcggcatcgcccccatttttaaaattatcaccgacaaacaggggcggttcgtttccggcaacattatccccatcactcaagtcggcgataaaatccccaaaatcgaccccgagaaaaccgttatcgggcggattatttatctgaaccgcagcgacttccccaacgagaacgggctggatgtctcgcccgacggcaacatcacgcgccggtaa

SEQ ID NO: 71464 - DNA, 1437 bp, Neisseria meningitidis
atgccgctgctgtctgtcgagttcgcactgttctttctcgccttcctgccgatttactggggcttggcgaaatacccgtccgtccaaaacctgctgcttttggctgccggtatgggctggctctaccatatcggccccgtatttgcggcaatcgtcgtcctttattcctcctgcgtgtaccttttgggcgaactgctccgttccgatcgcgaaaatacgcgccgcttttggctggggtgcggcattgccgtctcgctgaccgtcttgggctttttcaaatatttcgactttttccgcccgctgattgcacaatatgccggacaaggcggcgcaatcgacatcctgatgccgctggggctttcgtattacaccttccagtcaatcgcctatttggtttactgcttccgtgcgccgcacgccgcgcgtttcgagtggcacgaactgctgctgcacctgagttttttccccaccgttacctccggcccgattatccgcgccgccgcattcaaaagcgcggacggcgagcaggcgggcgcattggcgcaaatccgtacccaccaaccacgctcacccgtccgccccgcactcgccgtttccctgattctgctgggtattgccaaaaaatggtggctggcggggatgctcgcagaaaactgggtatcgcccgtatttgaaaatcccgcccaattcgacggctggggcgtattggcgggcgtgtacggctataccttccaactctttttagacttttccggatattccgacttggttatcggaatggcaatgctgctgggcttccggctgcccaaaaacttctccgcaccgcttcgtgccgcgaatatccgcgcattttgggacaaatggcacatcagcctttccacctggatacgcgactacatctacatccccttgggcggcagcaaaaaaggctttttgcggacacagttcaacctgatggcggcaatggtgctctcaggcatctggcacggctacggctggaacttcctcatttggggtgcactacacggcacggcgctggtgctgctcaacacgggcgaccgctatttcggacgcaacgcactatgccgtctgaaataccttgcgccgctctcgtggctcatcaccttccattttgtctgcctgaccttcgtcgtcttcaataccgcaaaccccgacgatgcaggcgcagttttcaatgccctctttgccaatgccaacggctggaatgcgccgcaacaggcggatatgctgctgcttgcctcgtttgcatccgtgatgctgctctacccttacctgcaacgcgctttcgacggcgcggtcaaaggtttggaaaaaatcccgatgtggctgtggtttatccccgtttccgccgtcctgctgctgattatcgtattggccccctcggggatacccggctttatttatgccaatttttaa

SEQ ID NO: 71465 - DNA, 1086 bp, Neisseria meningitidis; identical to SEQ ID NO: 38486

SEQ ID NO: 71466 - DNA, 1806 bp, Neisseria meningitidis; identical to SEQ ID NO: 54709

SEQ ID NO: 71467 - DNA, 1155 bp, Neisseria meningitidis
atgagtatccatctcgacttcggcattagtcctaaaacgttccgacagacttatctgtatcaaaagcccaagctctttaaaggagcggctcggaatctcgaagccgcatcttggaaagatatcaacgagatataccaacgagcagacccaaccgcaccgctgttttatctgcgtaaaaaaggtgcaattgttcctaaagaagaatacgtcgaaagtttcgacgctttgggcaaaactcgctaccgttttattaaatccgttatctacgaacatatgaagaatggtgcgtcgttagtctataaccatattaacaacgagccgttttcagatcatatttcccgtcaagtcgcccgctttgctggcgcacatactattgtcagtggatatcttgcttttggcagcgacgaatcttataaaaaccattgggacacccgcgatgtgtatgccatccagcttttcggcaagaaacgttggcaacttactgcccctgatttccctatgccattgtatatgcaacagactaaagatactgatatttccattcctgaacatatcgatatggatattatccttgaagcaggtgatgtcctctacatcccgcgcggttggtggcacagacctatcccgctcggctgtgaaaccttccacctcgctgtcggtacctttccgcccaacggctataattacctcgagtggctaatgaagaaattccccacgatagaaagtctgcgccacagtttctcagactgggagcaagataggacgcgtatcaacgatactgccgcacaaattgctgccatgattgccgaccccgtcaattacgaagccttcagtgaagacttcctcggcaaagaacgcaccgataccgcttttcatctcgaacagttcgcgaatcccaacgctactccgctttcagacgacgtcaggttgagactaaatgccaataatttggatacgttggaaaaggggtatttgattgggaatgggatgaagataagcgtagatgaattggggaaaaaagttttagaacacatcggtaagaatgaaccgttattgttgaaaaatctactggttaacttcaatcagggaaaacatgaagaagttaggaagttgatttatcagttgatagagttagattttctggaacttttgtga

SEQ ID NO: 71468 - DNA, 1020 bp, Neisseria meningitidis; identical to SEQ ID NO: 54594

SEQ ID NO: 71469 - DNA, 2178 bp, Neisseria meningitidis
atgacacgcttcaaatattccctgctgtttgccgccctgttgcccgtgtacgcgcaggccgatgtttctgtttcagacgaccccaaaccgcaggaaagcactgaattgccgaccatcaccgttaccgccgaccgcaccgcgagttccaacgacggctacactgtttccggcacgcacaccccgctcgggctgcccatgaccctgcgcgaaatcccgcagagcgtcagcgtcatcacatcgcaacaaatgcgcgaccaaaacatcaaaacgctcgaccgcgccctgttgcaggcgaccggcaccagccgccagatttacggctccgaccgcgcgggctacaactacctgttcgcgcgcggcagccgcatcgccaactaccaaatcaacggcatccccgttgccgacgcgctggccgatacgggcaatgccaacaccgccgcctatgagcgcgtagaagtcgtgcgcggcgtggcggggctgctggacggcacgggcgagccttccgccaccgtcaatctggtgcgcaaacgcccgacccgcaagccattgtttgaagtccgcgccgaagcgggcaaccgcaaacatttcgggctggacgcggacgtatcgggcagcctgaacaccgaaggcacgctgcgcggccgcctggtttccaccttcggacgcggcgactcgtggcggcggcgcgaacgcagccgcgatgccgaactctacggcattttggaatacgacatcgcaccgcaaacccgcgtccacgcaggcatggactaccagcaggcgaaagaaaccgccgacgcgccgctcagctacgccgtgtacgacagccaaggttatgccaccgccttcggcccgaaagacaaccccgccacaaattgggcgaacagccgccaccgtgcgctcaacctgttcgccggcatcgaacaccgcttcaaccaagactggaaactcaaagccgaatacgactacacccgcagccgcttccgccagccctacggcgtagcaggcgtgctttccatcgaccacaacaccgccgccaccgacctgattcccggttattggcacgccgacccgcgcacccacagcgccagcgtgtcattgaccggcaaataccgcctgttcggccgcgaacacgatttaatcgcgggtatcaacggttacaaatacgccagcaacaaatacggcgaacgcagcatcatccccaacgccattcccaacgcctacgaattttcccgcacgggcgcctatccgcagccatcatcgtttgcccaaaccatcccgcaatacggcaccaggcggcaaatcggcggctatctcgccacccgtttccgcgccgccgacaacctttcgctgatactcggcggcagatacagccgttaccgcaccggcagctacgacagccgcacacaaggcatgacctatgtgtccgccaaccgtttcaccccctacacaggcatcgtgttcgacctgaccggcaacctgtcgctttacggctcgtacagcagcctgttcgtcccgcaatcgcaaaaagacgaacacggcagctacctgaaacccgtaaccggcaacaatctggaagccggcatcaaaggcgaatggcttgaaggccgtctgaacgcatccgccgccgtgtaccgcgcccgtaaaaacaacctcgccaccgcagcaggacgcgacccgagcggcaacacctactaccgcgccgccaaccaagccaaaacccacggctgggaaatcgaagtcggcggccgcatcacgcccgaatggcagatacaggcaggttacagccaaagcaaaacccgcgaccaagacggcagccgcctgaaccccgacagcgtacccgaacgcagcttcaaactcttcactgcctaccactttgcccccgaagcccccagcggctggaccatcggcgcaggcgtgcgctggcagagcgaaacccacaccgaccctgccacgctccgcatccccaaccccgccgccaaagcccgcgccgccgacaacagccgccaaaaagcctacgccgtcgccgacatcatggcgcgttaccgcttcaatccgcgcgccgaactgtcgctgaacgtggacaatctgttcaacaaacactaccgcacccagcccgaccgccacagctacggcgcactgcggacagtgaacgcggcgtttacctatcggtttaaataa

SEQ ID NO: 71470 - DNA, 726 bp, Neisseria meningitidis; identical to SEQ ID NO: 55175

SEQ ID NO: 71471 - DNA, 2286 bp, Neisseria meningitidis; identical to SEQ ID NO: 55500

SEQ ID NO: 71472 - DNA, 150 bp, Neisseria meningitidis
atgaatatattttatggagaatatgaaaaagatttttattcttatgttcctttcatggaatcccaaggtataacgagtgaatgtatttgggaaggagatttgtttgatcatccatattatgaagatgaaaactcaaatgatatggattga

SEQ ID NO: 71473 - DNA, 1110 bp, Neisseria meningitidis
ttggaagcgcaactgggtgcgccgattgaggattacgcgccgccgaaacattggacgcgcaagcagctcagaagtatggggcgcgtgtcgtatttgtgcgtcgatgcggcggagcaggctttgacggatgccggtttgctcggggacgaaagcattaccgacggacgcatgggcgttgcctgcggctcttccagcggcagcaccaaagacatcggcgatgtgggcgaattgttgctgaccggcacgtcgcgcaacttcagtgccaacacctatgtgcgtatgatgccgcacaccaccgccgccaatatcggcatctttttcgggctgaaaggacgcatcatcccgacatcgagcgcgtgttcgtccggcagccaaggcataggttatgcctacgaagccatcaaatacggtctgaccgatatgatgctggcgggcggaggcgaagaatttttcccgtccgaagtgtatgttttcgactcgctttatgccgccagccgccgcaacggcgaaccggaaaaaaccccgcgcccatacgacgcgaaccgcgacgggctggtcatcggcgaaggcgcggggatttttgtgctggaagagttggaacacgccaaacggcgcggtgcgaaaatttacgccgaactcgtcggctacggagccaacagcgatgcctaccatatttccacgccccgccccgacgcgcaaggcgcaatccttgcctttcagacggcattgcaacacgcaggtcttgcgcccgaagacatcggctggattaatctgcacggcaccgggacgcaccacaacgacagtatggaaagccgtgccgttgcagcggttttcggcaacaatacgccctgcacgtccaccaagccgcaaaccggacacacgctgggtgcggcgggcgcaatcgaagccgcgttcgcgtggggcattgccgaccggcaaagcaatcccgaaggaaaacttccgccccagctttgggacgggcagaacgatccgaaccttcccgccatcaacctgaccggcagcggcagccgctgggaaaccgaaaaacgcattaccgccagctcgtcgtttgccttcggaggaagcaactgcgtcttaatcatcggatga

SEQ ID NO: 71474 - DNA, 1395 bp, Neisseria meningitidis
atgaacaaacaacccctttccctcgccgtcgtcggacacaccaacaccggcaaaacctcgctcctgcgtacccttttgcgcgacagcggtttcggcgaagtcagaaacgccccatcgaccacgcgtcatgtcgaagaagccgccatcagcgacggcgcagacacgctggttttcctgtacgacacgcccggactcgaagacgcgggcggcgtgctggaatggctggaaaaccatacggacaatcgttcagacggcatcgaacggctgcaacagtttctcggcagccacggcgcgcaccatgatttcaatcaggaagccaaagtcttacggcaagtcttgcaaagcgatatggcaatgtacgtcatcgacgcgcgcgaacccgttctcgacaaatatcgggatgaattgattatcctttcatggtgcgccaaaccggttatgcccgtgttcaactttaccggcggacagcctcccgaatcgtggacaaccatgctggcgaggagaaacctgcacgttttcgcagggttcgacaccgtcgcctttgattttgaaggcgaactacgcctgtgggaaaacctcgccaccatgttgcccgaacgcagcacacttgaccgcctgacagccatgcgccggcgcgaatggcagcggctggacggcgaagcgcgccgcgaaatcgccgatttcctgctcgatgccgccgccttcaggcaggaagtggacgaaaacgaggataccgccaccgtgctgcaaaccatgcaggcggaaatacgccaactcgaacggcagatgcagcagcggctgtttgccctctaccgtttctaccacagcgaaatcgacggcggcgactggatgccgcaagccttccgccaagacccgttcgacagcgaattgctcaaacaatacggcatccgcaccggcacgggcgcggcaactggcgcgctcatcggcttggggctggacatcgccacactcggcggctcgctcggattgggtacggcaatcggcggctttttgggcggcatcctgcccaatacccgcaccatttccgacaaactcgctggccgccaaaccctgcacaccgaccctgaaaccttgaccctgctcgccgcccgcgccctcgatttgctccacgtcctgcaaacgcgcggacacgcggcacagtcggatatcgagctgcacagccgcaaagccccgtgggacgccgccagactcccgcccgaactcaacaaagcccgcagtcattggaaatggtcgtcgctcaatacgcaccgccccgaaaccagccgcgccgaacgcgccggatatgtggagaaacttcaaatccgcctgtcgggaaaatatagtgaattaaatttaaatcaggacaaggcggcgagccgcagacagtacaaatag

SEQ ID NO: 71475 - DNA, 336 bp, Neisseria meningitidis
  misc_feature 6, 7, 8, 9, 10: 'n' is a, c, g or t
gtgtgnnnnntttcagacgacgaagtacatcaagtcgtcaactacgtcaaatcgcaagccccagccgactatattgaaggtctgctcagcggcgaggccgcgctggaaactgccaatatcgttaatccgaatgcagacagcgacgaattgttcgatcaggcagtcgcctatgttttggaaagcaaaaaaacctccatttcgtctttgcagcggcagttgcgtatcggctataaccgcgcggcaaacctgatggaggcactggaaaatgcgggtgtcgtttctcccaccgacctcaacggcagccgtaaaattttggcgcacaaggaccatttgtag

SEQ ID NO: 71476 - DNA, 762 bp, Neisseria meningitidis
atgaccgaattcgtcgtattgattccggcgcggctggattcgtcgcgcctgcccagaaaagccttggcggacatccacggcaaaccgatggtcgtgcgcgttgccgaacaggcggcaaaaagtaaagctgcgcgcgtcgttgttgccaccgaccatcccgatattcagacggtctgtcaggcgcacggcgtcgaagtcgtcatgacttcaaaccggcacgaaagcggcacgacgcgccttgccgaagcctctgccgcgctgaagctgccgccgcatctggtggttgtcaacgtacagggcgacgagccgctgattgcccccgaactcatcgaccgcactgccgaagtcttggtggaaaacaacgtacagatggcaactgcggcacacgaattgcacgatttcgacgaattgatgaatcccaatgccgtcaaagtcgtcctcgacaaaaaccgcaacgccatctacttcagccgcgccccgattccctatccgcgcgatgcgatgcgtgccggaaaacgcgaaatgccgtctgaaaccgccgtcctgcgccatatcggcatctacgcttaccgcgccggcttcctgcaacgctatgccgaaatgagcgtttcgccgctggaaaccatcgaatcgctggaacagctgcgcgtcctgtggcacggttatcccattgccgtcgaaaccgccaaagaagcccccgccgccggtgtggatacgcaggaagatttggatagggttcgcgctgtatttcagaccgtataa

SEQ ID NO: 71477 - DNA, 1068 bp, Neisseria meningitidis
atgggcggtaaaacctttatgctgatggcgggcggaacgggcggacatattttccccgcgctggcggtggcggattcattgcgcgcgcgcggccatcatgtgatttggctgggcagcaaggattcgatggaagagcgtatcgtgccgcaatacggcatacgcttggaaacgctggcgattaaaggcgtgcgcggcaacggcatcaaacgcaagctgatgctgccgtttactttgtatcaaaccgtccgcgaagcgcagcggattatccgcaaacaccgtgtcgagtgcgtcatcggcttcggcggcttcgttaccttccccggcggtttggcggcgaagttattaggcgtgccgattgtgattcacgagcaaaacgccgtggcaggtttgtccaaccgccacctgtcgcgctgggcgaagcgggtgttgtacgcttttccgaaagcgttcagccacgaaggcggtttggtcggcaatcccgtccgcgccgatattagcaacctgcccgtgcctgccgaacgcttccaagggcgtgaaggccgtctgaaaattttggtggtcggcggcagtttgggcgcggacgttttgaacaaaaccgtaccgcaggcattggctttgctgcccgacaatgcgcgtccgcagatgtaccaccaatcgggacggggcaagctgggcagcttgcaggcggattacgacgcgctgggcgtgcaagcggaatgcgtggaatttattaccgacatggtgtccgcctaccgcgatgccgatttggtgatttgccgtgccggcgcgctgacgattgccgagttgacggcggcgggattgggtgcgttgttagtgccgtatcctcacgccgttgatgaccatcaaaccgccaacgcacgttttatggtgcaggcggaggcgggattgctgttgccgcaaacccagttgacggcggaaaaactcgccgaaatcctcggcagcctgaaccgcgaaaaatgtctcaaatgggcagaaaacgcccgtacgttggcactgccgcacagtgcggacgacgtggcggaagccgctatcgagtgtacggcatga

SEQ ID NO: 71478 - DNA, 477 bp, Neisseria meningitidis
atgaaaacaaatttcaaacagaaaattatcgaacaggcacgcagcgaaggcttgcaggtaaccgctttgcgcgagcaggtattagatattgtcttgcagcaaagcggcgtgattaaagcctacaacgtcttgtcgcagatgcagcagcaaagcgagggcgtgcttgcaccgcctaccgcctaccgcgcccttgatttttgggcggagcagggcgttttgcacaaagtggcggcggtcaacggctatattttgtgcagccacgcgcagcacgagtgcgacgaccattgccacgaccacgaagaagccgaagcgcaccacagcgcgtttattttggtctgcaccgaatgcggcacggcggacgagcaaaccctcagccacgagtgggcggcactgcgcgcaggcgttgccgaaagcggctttgcgctgaaagaagaacacgttgttttaactgggatttgtaaaaaatgtcagaaatga

SEQ ID NO: 71479 - DNA, 417 bp, Neisseria meningitidis; identical to SEQ ID NO: 39610

SEQ ID NO: 71480 - DNA, 126 bp, Neisseria meningitidis; identical to SEQ ID NO: 42246

SEQ ID NO: 71481 - DNA, 141 bp, Neisseria meningitidis; identical to SEQ ID NO: 55270

SEQ ID NO: 71482 - DNA, 1407 bp, Neisseria meningitidis; identical to SEQ ID NO: 54216

SEQ ID NO: 71483 - DNA, 267 bp, Neisseria meningitidis; identical to SEQ ID NO: 42299

SEQ ID NO: 71484 - DNA, 2385 bp, Neisseria meningitidis; identical to SEQ ID NO: 56014

SEQ ID NO: 71485 - DNA, 753 bp, Neisseria meningitidis
  misc_feature 6, 7, 8, 9, 10: 'n' is a, c, g or t
gtgtgnnnnncagaacgtattttgcgcgatgttcagaacattaaaaatatcggcagcgagtttaccggacaggacagcggttcgctgacggttgccacgacgcatactcaggcacgctatgccctacccttgattgttgccgattttgtgaaacgctatccgaaagtcaacctgaccatcaaacaggggagccctgccgccatcgcccaaatggttacttcgggagagtctgatttggcaattgttacggaacgtatagacgaccaccccgaactgggaagactttcctgctacgactggacacacgcggttatcgtaccgaacgaccaccccttgctcgaatgcagaaaccccctccgtattgaagatttggcgaggtttccgctgattacttatgaatttgcattcaatgcgggcagcagcatcgcgcgggcattttccaaagcccgtttggaacagccggatgtcgcattggcggcggcggatacggacgtattgaagacttatgtgcgcttgggtttgggcgtgggactgatggcgaaaatggcgtacaacccggatacggacggcgatttgcagcttgtggatgcggcacacctgttcgagccgtcgccgacgtggattgctttgcgcagcgatacttatttgcgcggatatgcctacgactttatccaagcgtttgcgccgcacctgacacgcgagaaggtggataggattctgtacacgcccatcagcgaggatttttcgatttag

SEQ ID NO: 71486 - DNA, 1497 bp, Neisseria meningitidis; identical to SEQ ID NO: 44464

SEQ ID NO: 71487 - DNA, 1239 bp, Neisseria meningitidis; identical to SEQ ID NO: 38584

SEQ ID NO: 71488 - DNA, 1002 bp, Neisseria meningitidis; identical to SEQ ID NO: 36643

SEQ ID NO: 71489 - DNA, 1512 bp, Neisseria meningitidis
atgaaatggttgaaacgcctgacggtcattgtcgggactttttaccgctatcggctggcaggtctgtgcgcttcactgatgggtagcggttggatatgcgctctgctgaaaatgatgccgcagtcgtccaaattgaaaaacgaaccgcctgccgtccgtctgcgccttgccttggaaagcctggggccgattttcatcaagttcgggcaggttttgtccacacgccccgatttgattccgcacgattacgccgtcgaactggcaaagctgcaagacaaagtgccgccttttgacgcgcggctttcgcgtgaacaaatcgaaaaatcgctgggtcagcccatcgaaaagctgtatgcggaatttgaaaccgagcccatcgccagcgcgtccatcgcccaagtacacaaagcccgcctgcattcgggcgaacaagtggcggtcaaagtcttgcgccccaaccttttgcccgtgatcgaacaggatttgtcgctgatgcgctttggtgcaggctgggtcgagcgtctgtttgccgacggcaagcgtctgaagccgcgcgaagtggtggcggagttcgacaaatatctgcacgacgagttggacttgatgcgcgaagccgccaatgccagccagctcggacgcaatttccaaaacagcgatatgctgattgtgccgaaggtgttttacgactactgcaccagcgacgtgctgaccatcgaatggatggacggcacgccggtttccgacatcgccaaactcaaagcagacggcatcgatttgcacaaactcgccgattacggcgtggaaatctttttcacgcaggtcttccgcgacggttttttccacgcggatatgcaccccggcaatattttggttgccgccgacaaccgctacatcgccctcgatttcggcatcgtcggcacgctgaccgattacgacaaacgttatctcgccatcaacttcctcgccttcttcaaccgcgattaccggcgcgtcgccaccgcccacatcgaatcgggctgggtgcccgccgacacgcgcgcggaagagttggaagcggctgtccgcgccgtgtgcgaaccagtgttcaacaaaccgatttcgcagatttccttcggcttggtgctgatgcgcctgtttgaagtcagccgccgcttcaatgtcgaaatccagccgcagctggtattgctgcaaaaaacgctgctcaacatcgaaggcttgggacggcagcttgatcccgatttggacttgtggaaaaccgccaaaccgtttttggtgaaatggatgaacgggcaggtcggccctaaagccctttggcgcaacctcaaaaacgaagcccccgactgggcgcaaatcattccttcattgccgcgcaaaatcagtgcgttgattgatgaaaaccgccagcaggaaatgcgtgatgcctatatccatttggtcaaagtgcagcagcggcaaagcctgtggctggcggcgatagcggttgttttgctgctgattttgcttttgaaatag

SEQ ID NO: 71490 - DNA, 1236 bp, Neisseria meningitidis; identical to SEQ ID NO: 42263

SEQ ID NO: 71491 - DNA, 705 bp, Neisseria meningitidis
  misc_feature 6, 7, 8, 9, 10: 'n' is a, c, g or t
gtgtgnnnnntccgcgaaatcgccgataaagtcggcgcatacctctttgtcgacatggcgcactacgccggactgattgccggtggcgaatatcccaacccggtgccattctgcgacttcgttaccaccaccacccacaaaaccctgcgcggtcctcgcggcggcgtaattttgtgccgcgacaatacccacgaaaaagcgttgaactcttccatcttcccaagcctgcaaggcggcccgctgatgcacgttatcgccgccaaagccgtggcgtttaaagaagcattgcaacccgagttcaaacaatacgcaaaacaagtgaaaatcaatgcagccgccatggcggaagagttggttaaacgcggtttgcgcatcgtttccggccgcaccgaaagccacgttttcctcgttgacctgcaaccgatgaaaattaccggcaaagccgccgaagctgctttgggcaaagcgcacatcactgtcaacaaaaacgccatcccgaatgatccggaaaaacccttcgttacctccggcatccgcatcggttccgccgccatgaccacacgcggttttaacgaagccgacgcgcgcgtattggcgaacttggttgccgacgtattgtctaaccccgaagacgaagccaacctcgccaaagtccgcgaacaagtaactgctttgtgcaataaataccccgtttacggcgcgtaa

SEQ ID NO: 71492 - DNA, 966 bp, Neisseria meningitidis
atgttgcgtttgaccgcattgaccctctgcaccgtcctcgccttgggcgcgtgttcgccgaaagattccgactctgccccacaagccaaagaacaggcggtttccgccgcacaatccgaaagcgcgtccgttaccgtcaaaaccgcgcgcggcgatgttcaaataccgcaaaaccccgaacgtatcgccgtttacgatttgggtatgctcgacaccttgagcaaactgggcgtgaaaaccggtttgtccgtcgataaaaaccgcctgccgtatttagaggaatatttcaaaacgacaaaacctgccggcactttgttcgagccggattacgaaacgctcaatgcctacaagccgcagctcatcatcatcggcagccgcgcagccaaagcgtttgacaaattgaacgaaatcgcgccgaccatcgagatgaccgccgataccgccaacctgaaagaaagctcaaaagagcgtatcgacgcgctggcgcaaatcttcggcaaacaggcggaagccgacaagctgaaggcggaaatcgacgcgtcttttgaagccgcgaaaaccgctgcgcaaggcaaaggcaaaggtttggtgattttggtcaacggcggcaagatgtccgccttcggcccgtcttcacgactgggcggctggctgcacaaagacatcggcgttccagccgttgacgaagccattaaagaaggcagccacggccagcctatcagctttgaatacctgaaagagaaaaaccctgattggctgtttgtccttgaccgcggcgcggccatcggcgaagagggtcaggcggcgaaagacgtgttggataatccgctggttgccgaaacaaccgcctggaaaaaaggacaggtggtttacctcgttcccgaaacttatttggcggccggcggcgcgcaagagctgctgaatgcaagcaaacaggttgcggatgcgttcaacgcggcaaaataa

SEQ ID NO: 71493 - DNA, 381 bp, Neisseria meningitidis; identical to SEQ ID NO: 63606

SEQ ID NO: 71494 - DNA, 729 bp, Neisseria meningitidis; identical to SEQ ID NO: 36379

SEQ ID NO: 71495 - DNA, 1413 bp, Neisseria meningitidis; identical to SEQ ID NO: 55852

SEQ ID NO: 71496 - DNA, 933 bp, Neisseria meningitidis; identical to SEQ ID NO: 55401

SEQ ID NO: 71497 - DNA, 966 bp, Neisseria meningitidis; identical to SEQ ID NO: 71329

SEQ ID NO: 71498 - DNA, 1167 bp, Neisseria meningitidis; identical to SEQ ID NO: 54540

SEQ ID NO: 71499 - DNA, 840 bp, Neisseria meningitidis; identical to SEQ ID NO: 44765

SEQ ID NO: 71500 - DNA, 1281 bp, Neisseria meningitidis
atggaaaactcattgaaagaagccgccctcaagttccacgaattacccgttccgggcaaaatttccgttaccccgaccaaatctttggcgaccgacaaagatttggcgttggcgtactctccgggcgtagccgctccttgtatggaaatccatgccgatccgcaaaatgcctacaaatacaccgccaaaggcaacttggtcgccgtcatttccaacggtacggccgttttgggcttgggcgacatcggcgcgctggcgggcaaacccgtgatggaaggcaaaggcgtattgttcaaaaaattcgccggtgtggacgtgttcgacatcgaaatcgatgaaaaagacccgcaaaaactcgtggacatcatcgccgctttagagccgaccttcggcggcatcaacctcgaagacatcaaagcacccgagtgtttctacatcgaacgcgaattacgcaaacgctgcaaaatccccgtattccacgacgaccagcacggcacggccatcattaccgccgctgccgtattgaacgccctgcgttttaccggccgtaaaatcgaagaagcgactttggtgtgttccggcgcaggtgcggccgcgattgcctgcttgaaccaattgctggatttgggcttgaaacgcgaaaacgtgaccgtttgcgactccaaaggcgtgatttaccaaacccgcgaagacaaagatcgcatggacgaatccaaaaaattctacgccgttgaagacaatggccagcgcgtacttgccgatgccgtcaaaggtaaagacatcttcttgggcctctccggcgcgaacctgctgacccccgaaatgttgaacacgatgaacgaaaaacccatcgtgttcgccatggccaacccgaatccggaaatcctgccgccgctggcaaaagaaacccgtccggacgtggttatcggtaccggccgttccgacttcccgaaccaagtgaacaacgtattgtgcttcccattcatcttccgtggcgcgttggatgtcggcgcgacgaccatcaacgaagaaatgaaacgctcctgcgtgtatgctttggcggatttggcgatggaagaagtaaccgaagaagtggttgccgcttacggtaagaaatttgaattcggcgcggaatacctgattccgactccgttcgattcccgcctgctgccgcgcgttgctacggctgccgccaaagcagcgatggaaagcggcgtggcaacccgtccgattgccgactttgaagcctacgccgccaagctgggcgaatggaagctgtaa

SEQ ID NO: 71501 - DNA, 990 bp, Neisseria meningitidis; identical to SEQ ID NO: 60407

SEQ ID NO: 71502 - DNA, 852 bp, Neisseria meningitidis; identical to SEQ ID NO: 55336

SEQ ID NO: 71503 - DNA, 1131 bp, Neisseria meningitidis; identical to SEQ ID NO: 60468

SEQ ID NO: 71504 - DNA, 444 bp, Neisseria meningitidis; identical to SEQ ID NO: 55663

SEQ ID NO: 71505 - DNA, 921 bp, Neisseria meningitidis; identical to SEQ ID NO: 61951

SEQ ID NO: 71506 - DNA, 831 bp, Neisseria meningitidis; identical to SEQ ID NO: 54954

SEQ ID NO: 71507 - DNA, 1644 bp, Neisseria meningitidis
atgcagcgtcagcagcacatagatgctgaattgttaactgatgcaaatgtccgtttcgagcaaccattggagaagaacaattatgtcctgagtgaagatgaaacaccgtgtactcgggtaaattacattagtttagatgataagacggtgcgcaaattttcttttcttccttctgtgctcatgaaagaaacagcttttaaaactgggatgtgtttaggttccaataatttgagcaggctacaaaaagccgcgcaacagatactgatcgtgcgtggctacctcacttcccaagctattatccaaccacagaatatggattcgggaattctgaaattacgggtatcagcaggcgaaataggggatatccgctatgaagaaaaacgggatgggaagtctgccgaaggcagtattagtgcattcaataacaaatttcccttatataggaacaaaattctcaatcttcgcgatgtagagcagggcttggaaaacctgcgtcgtttgtcgagtgttaaaacagatattcagattataccgtccgaagaagaaggcaaaagcgatttacagatcaaatggcagcagaataaacccatacggttcagtatcggtatagatgatgcgggcggcaaaacgaccggcaaatatcaaggaaatgtcgctttatcgttcgataaccctttgggcttaagcgatttgttttatgtttcatatggacgcggtttggcgcacaaaacggacttgactgatgccaccggtacggaaactgcaagcggatccagaagttacagcgtgcattattcggtgcccgtaaaaaaatggctgttttcttttaatcacaatggacatcgttaccacgaagcaaccgaaggctattccgtcaattacgattacaacggcaaacaatatcagagcagcttggccgccgagcgcatgctttggcgtaacagacttcataaaacttcagtcggaatgaaattatggacacgccaaacctataaatacatcgacgatgccgaaatcgaagtgcaacgccgccgctctgcaggctgggaagccgaattgcgccaccgtgcttacctcaaccgttggcagcttgacggcaagttgtcttacaaacgcgggaccggtatgcgccaaagtatgcccgcacctgaagaaaacggcggcggtactattccaggcacatcccgtatgaaaatcataaccgccggattggatgcagcggccccgtttatgttgggcaaacagcagtttttctacgcaaccgccattcaagctcaatggaacaaaacgcctttggttgcccaagacaagttgtctatcggcagccgctacaccgttcgcggatttgatggggagcagagtcttttcggagagcgaggtttctactggcagaatactttaacttggtattttcatccgaaccatcagttctatctcggtgcggactatggccgcgtatctggcgaaagtgcacaatatgtatcgggcaagcagctgatgggtgcagtggtcggcttcagaggagggcataaagtaggcggtatgtttgcttatgatctgtttgccggcaagccgcttcataaacccaaaggctttcagacgaccaacaccgtttacggcttcaacttgaattacagtttctaa

SEQ ID NO: 71508 - DNA, 489 bp, Neisseria meningitidis
  misc_feature 470, 471, 472, 473, 474: 'n' is a, c, g or t
atgaaaggcgaccgtctggttatccgcgagctaaacaaaaacttaggcttgctgctggtaaccatcaaccaatatttccttcacgcccgtattttgaaaaactggggctttgaagaactgggcgaacatttcttcaaacagtccatcgttgaaatgaaagctgccgacgatttgatcgagcgcattctgttcctcgaaggtctgccgaacctgcaagaactgggcaagcttctgattggcgagtccaccgaagaaatcatcgcctgcgatttgaccaaagaacaggaaaaacacgaagccctgcttgccgccatcgccacagcagaagcgcaacaggattacgtcagccgtgatttgttggaaaaacaaaaagacaccaacgaagaacacatcgactggcttgaaacccagcaggaactgatcggcaaaattggtttgccgaactacctgcaaacagcggcgcaagaggnnnnncacacacttaattaa

SEQ ID NO: 71509 - DNA, 318 bp, Neisseria meningitidis; identical to SEQ ID NO: 54811

SEQ ID NO: 71510 - DNA, 1815 bp, Neisseria meningitidis
atgagtgaacacgatatgcagaacacaaatccgccattaccgcctctgccgcccgaaatcacgcagctcctgtcggggctggacgcggcacaatgggcgtggctgtccggctacgcttgggcaaaagcaggaaacggggcatctgcaggactgcccgcgcttcagacggcattgccgacggcagaacctttttccgtaaccgtcctttccgcctcgcaaaccggcaatgcgaaatccgttgccgacaaagcggcggacagcctggaagccgccggcatccaagtcagtcgcgccgaactgaaagactataaggcgaaaaacatcgccggcgaacgccgcctgctgctggttacgtccacccaaggcgaaggcgaaccgccggaagaagccgtcgtgctgcacaaactgctgaacggcaaaaaagccccgaaattggacaaactccaatttgccgtactgggtttgggcgacagttcctatccgaatttctgccgggcgggcaaagatttcgacaaacgttttgaagaattgggggcgaaacgcctgctcgaacgcgttgatgcggatttggactttaccgcctccgcaaacgcctggacagacaatatcgccgcactcttaaaagaagaagccgcaaaaaaccgggcaacgcccgcgccgcaggcaacgccccccgccggccttcagacggcatcggagggcaggtactgcaaggcagacccctttcccgccgccctgctggccaatcagaaaatcaccgcccgccaatccgataaagacgtgcgccacatcgaaatcgatttgagcggttcggatttgcactacctcccgggcgacgcgctcggcgtttggtttgacaacgatccggcactggtcagggaaatcctagacctgctcggcatcgatccggcaacggaaatacaggcgggcggaaaaaccctgccggttgcctccgcactgttatcccattttgaactcacgcaaaacacccctgcctttgtcaaaggctatgccccgttcgccgatgatgacgaactcgaccgtattgctgccgacaacgccgttttgcaaggctttgtgcaaagcacgccgattgccgatgtgctgcaccgcttcccggcaaaactgacggcggaacaattcgccggcctgctgcgcccgcttgcgccgcgcctgtattcgatttcctcgtcgcaggcggaagtgggggacgaagtgcacctgaccgtcggcgcggtgcgttttgaacacgaagggcgcgccagagcgggcggcgcatcgggtttccttgccgaccggctggaagaggacggcacggtgcgcgtgtttgtggaacgcaacgacggcttcaggctgcccgaagacagccgcaagccgattgtgatgatcggctcgggcaccggcgtcgcaccgttccgcgctttcgtccaacaacgtgccgcagaaaatgcggaaggcaaaaactggctgattttcggcaatccgcattttgccgccgacttcctctatcagaccgaatggcagcagtttgccaaagacggcttcctgcacagatacgatttcgcctggtcgcgcgatcaggaagaaaaaatctatgtgcaggacaaaatccgcgaacaggcggaaggactttggcaatggctgcaggaaggcgcgcatatctatgtgtgcggcgatgcggcaaaaatggcaaaagacgtggaagccgccttgctggatgtgattatcggggcaggacatttggacgaagagggcgcagaagaatatttggatatgctgcgcgaagaaaaacgctatcagcgtgatgtttattga

SEQ ID NO: 71511 - DNA, 633 bp, Neisseria meningitidis
atgccgtctgaaccgccttcagacggcattgcccgacaccccaaaagcacaatcaaaatggcaaaaaaaccgaacaaacccttcaggctgacccccaaactcctgatacgcgccgtattactcatctgtatcaccgccatcggcgcattggcaataggcatcgtcagcacattcaacccgaacggcggcaaaaccctccaaaccgaaccgcaacacaccgacagcccccgcgaaaccgaattctggctgccaaacggcgtagtcggacaagatgccgcccaacccgaacaccaccacgccgcctcatccgaacccgcacagccggacggcacagacgaaagcggcagcggactgccgtcccctgccgcacccaagaaaaaccgggtcaaaccgcaacctgccgacacagctcaaaccgacaggcagccggacgacgccggaacacaagctgaaaacacactcaaagaaacccccgtactgcccacaaacgtcccccgtcccgaaccccgaaaagaaacacccgaaaaacaggcgcagcccaaagaaacgcccaaagaaaaccataccaaaccggacaccccgaaaaacacgccgcccaaaccccataaagaaattctcgacaacctcttctga

SEQ ID NO: 71512 - DNA, 1470 bp, Neisseria meningitidis
atgacaactgcgcgctgggtaatagataaacatttacagaattttcatattttatgtaaatttgcaggtattttgaaaacaaattcttttatatctgtagaggataaagctaagttatctgaaaaattggaaaaactagatttataccatagacgaaatacaggtaaatcattggatgctactactcataaaataaaagaattatcattctatatgtttggttatcgtgatgtgtgtgggcaagttacacagaaattcctgttcagtccattgggtaatttatttttgaaacacttggataataatgaatatattcaaaaaatttttcttactatgttgtgggcgataccatttcctcatccgtacattaagactgatgaaagtattcaattatatcccatgagactaatatttaagttgttatctgatgaaagattggattgtaaactattttcttatgaatatatctatttaatttcatttgtgaaatctgctgatcagaatagctatgaaaaattagtacaagacattttggtgttacgaacatgtgctgaagtaaaaattaaacatcaattaactgcggaaaatagtcgtagtcatgcttatgtaaatgcagcacatgagtgggaatcttatttttcaaaaacattgactgatgcaggtgttttgcaaaaaacagatggtaaaattatttgccgtctaaagcatggtaagaccgaaacatatcgtacagtaacatcaagtgagttttcgattcctaagcaacttcaggaatttgtgaaaaaattgcaaagtgcttattcgttttcagaaatgccattaaatctgaacgatagtgatcgtttgaaaattgatgtcattaaggaaatttatagcttctatccaaaagagttattggaggaaattggtgagcttaaggatgaagcagcatatgaattattgcacttacctaggttgattgaacaatatgcagataataataatggaacagaggcatatctatttgaagatgttctagaaatggggttcaatatgttttataacgtagaagctaaaaaaattggtggaccaggtaatacggatttagagtgcttatatattacgcaaaagagaaaatttgcagtggaggcaaaatcaactaaaaataagttatcaggtattaattcaggaagattggaagatcataaaaataaaattaaggccatttacacaattgttgtcacaccacgttatgtccctgccgtattatccgatattcgtaattgcccaattgtaattattcgtgccaatacatttgctgaatttttatataattgtttgattaatcgctccagtattccagagattgattatcggtattttgatgaaattattattaaaaatcttggaaaagatattagttcagaaatttccaatttgactatgcaacagtttgcaagtaacaccacaatggaagcgtatagtacatga

SEQ ID NO: 71513 - DNA, 2604 bp, Neisseria meningitidis
atgagcaaaaccgtccgttatctgaaagattaccaaacgcctgcctaccgcattctcgaaaccgacctgcatttcgatattgccgaaccgcaaaccgtcgtgaagtcgcgtttgacggttgagccgcagagggtaggggagccgctggtgttggacggttcggcgaaactcttgtccgtcaaaatcaacggcgcggcggcggattatatgttggaaggcgagacgctgacgattgcagacgtgccgtccgaacgcttcaccgtcgaagtggaaaccgaaatcctgccggcggaaaacaaatcgctgatggggctgtatgcgtccgccggtaacctgtttacccagtgcgagccggagggcttccgcaaaatcacgttctatatcgaccgtccggatgtcatgtccaagttcacgaccaccatcgtcgcggacaaaaaacgctatcccgttttgctctccaacggcaacaaaatcgacggcggcgagtattcagacggccgccattgggtgaaatgggaagacccgtttgccaaaccgagttatctgtttgctttggtcgcgggcgatttggcggtcacggaagactatttcaccaccatgagcggcagaaacgtcaaaatcgagttttacactgccgaggcggacaagcctaaggtcggctttgccgtggaatccttgaaaaacgcgatgaagtgggacgaaacgcgcttcggtttggaatacgacttggatattttcatggtcgtcgccgtgggcgatttcaatatgggtgcgatggaaaacaaggggctgaacatttttaataccaagttcgtccttgccgacagccgtaccgccaccgataccgattttgaaggcatcgaatccgtggtcggacacgagtatttccacaactggacaggcaaccgcgttacctgccgcgattggttccagctttcgctgaaagaagggttgaccgtgttccgcgaccaagaattttccggcgaccgcgccagccgcgccgtgcgccgcatcgagaacatccgcctgctgcgccagcaccagttccccgaagacgcaggcccgaccgcccatccggtgcgccccgccagctatgaggagatgaacaatttctacaccatgaccgtttatgaaaaaggcgcggaagtggtgcggatgtatcacaccttgctcggcgaagagggcttccaaaaaggcatgaagctctatttccaacgacacgacgggcaggccgtgacctgcgacgatttccgcgcggcgatggcggacgcgaacggcatcaatctcgaccagttcgccttgtggtacagccaggcgggtacgcccgtcttggaagcggaaggtcgtctgaaaaacaatagtttcgagttaaccatcaaacaaaccgtgccgcccacgcccgatatggcggacaagcagccgatgatgattcccgtcaaaatcgggctgctgaaccgcaacggcgaagcggcggcattcgattatcagggcaaacgcgcgaccgaagccgtattgctgctgaccgaagccgaacagatcttcctgctcgaaggcgtaaccgaagccgtcgttccctcgctgctgcgcggcttcagcgcgccggtgcatctgaactatccgtacagcgacgacgacctgctgcttctgctcgcccatgacagcgacgccttcacgcgctgggaagccgcccaaacgctctaccgccgtgccgtcgccgccaaccttgccgcgctttcagacggcatcgggttgccgaaacacgaaaaactgcttgccgccgtcgaaaaagtcatttcagacgacctcttagacaacgctttcaaagccctgcttttgggtgtgccgtctgaagccgagctgtgggacggcgcggaaaacatcgacccgctgcgctaccatcaggcgcgcgaagccttgttggatatacttgccgtccgctttctgccgaaatggcacgaattgaaccgtcaggcggcgaagcaggaaaaccaaagctacgagtacagccccgaagccgccggttggcgcacgctgcgcaatgtctgccgcgccttcgtcctgcgcgccgatcccgcgcacatcgaaaccgttgccgagaaatacgccgaaatggcgcaaaacatgacccacgaatggggcatcctgtccgccgtcaacggcaacgaaagcgatacgcgcaaccgcctgctggcgcagtttgccgacaagttttcagacgacgcgctggtgatggacaaatatttcgccctcgtcggctcaagccgccgcagcgacaccctgcaacaggttcaaaccgccttgcagcatccgaagttcagcctcgaaaatcccaacaaagcccgctcgctcatcggcagcttcagccgcaacgtcccgcatttccacgcagaagacggcagcggctaccgcttcatcgccgacaaagtcatcgaaatcgaccgctttaacccgcaggtcgccgcccgcctggtgcaggcgttcaacctctgcaacaagctcgagccgcaccgcaaaaacttggtgaaacaagcattgcagcgcattcgggcgcaggaaggattgtcgaaagacgtgggcgaaatcgtcggcaaaattttggattga

SEQ ID NO: 71514 - DNA, 954 bp, Neisseria meningitidis; identical to SEQ ID NO: 54637

SEQ ID NO: 71515 - DNA, 288 bp, Neisseria meningitidis; identical to SEQ ID NO: 36618

SEQ ID NO: 71516 - DNA, 669 bp, Neisseria meningitidis; identical to SEQ ID NO: 60931

SEQ ID NO: 71517 - DNA, 642 bp, Neisseria meningitidis; identical to SEQ ID NO: 55159

SEQ ID NO: 71518 - DNA, 387 bp, Neisseria meningitidis; identical to SEQ ID NO: 44892

SEQ ID NO: 71519 - DNA, 771 bp, Neisseria meningitidis
gtgtccgaaacacaaaacgaacaaaccgtccaaccgcttgtcgagcatctcatcgagctgcgccgccgcctaatgtggacggttgtcggcatcttagtctgctttttcggcatgatgccgtttgcccaacaactctatacttttatcgccgacccgctgatggcaaacctgcccaaagacaccagcatgattgccaccgatgtcatcgcaccatttttcgtgccggtcaaagttaccctgatggcggcatttttaatttcgctgccgcatacgctctaccaaatctgggcatttgtcgcgcccgcactctaccaaaacgaaaaacgcctgattacgccgctcgtcctctccagcgtcagcctgtttttcatcggcatggcatttgcctactttttggttttccccgtcattttcaaattccttgccagcgttacccctgtcggtgtcaatatggcgacagacatcgacaaatacctgtcttttatcttaggcatgtttgttgcgttcggcacaacctttgaagtccccattgtcgttatcctgttaaccaaaattggtgtggtaacaaccgaacagctcaaacgcgcccgcccctatgtgattgtcggcgcgtttgtcattgccgccatcatcacgccgcccgatgtgatttcacaaaccctgcttgccattccgctgattctcttatacgaagcaggtatttggttcggacgctttttcacgccacgttcagaacaggatggcgacatacagccgcctgcaacaacctga

SEQ ID NO: 71520 - DNA, 393 bp, Neisseria meningitidis; identical to SEQ ID NO: 54872

SEQ ID NO: 71521 - DNA, 312 bp, Neisseria meningitidis; identical to SEQ ID NO: 55809

SEQ ID NO: 71522 - DNA, 291 bp, Neisseria meningitidis; identical to SEQ ID NO: 41988

SEQ ID NO: 71523 - DNA, 942 bp, Neisseria meningitidis; identical to SEQ ID NO: 54927

SEQ ID NO: 71524 - DNA, 354 bp, Neisseria meningitidis; identical to SEQ ID NO: 39807

SEQ ID NO: 71525 - DNA, 696 bp, Neisseria meningitidis; identical to SEQ ID NO: 42672

SEQ ID NO: 71526 - DNA, 1182 bp, Neisseria meningitidis; identical to SEQ ID NO: 55531

SEQ ID NO: 71527 - DNA, 453 bp, Neisseria meningitidis
atgaatattgaagtagaaatgaaagtgttggacgagaggatggcggattttgtccctgcctatgcgacggagggttctgctggtttagatttgcgtgcctgtttggatgaggaagttgtcttgcagccgggtgaaacgtttcttgtaccgacaggtttggcaatttatttggcgaatcccgcatatgccgccgttttgctgccccgttccggcttggggcataaacacggcattgttttgggcaatttggtcggtttgattgactccgattatcaaggggaattgaaggtgtcgttatggaacagaagcagcgaaccgtttgccgtcaagccgtttgagcgtatcgcgcagatggttatcgttccaatcgtacaggcgggcttcaaacgtgtcgaggagtttgtcggaagcagccggggtgagggcggcttcggcagtacgggttctcactaa

SEQ ID NO: 71528 - DNA, 1203 bp, Neisseria meningitidis; identical to SEQ ID NO: 55366

SEQ ID NO: 71529 - DNA, 1566 bp, Neisseria meningitidis
atgacccaagacaaaatcctcatcctcgacttcggttctcaagttacccagctgattgcccgccgcgtgcgcgaagcccacgtttactgcgaactgcattccttcgatatgcctttggacgaaatcaaagccttcaaccccaaaggcatcatcctctctggcggccccaattccgtttacgaatccgactatcaagccgataccggtatttttgatttgggcattccggttttgggcatctgttacggcatgcagtttatggcgcaccacttgggcggcgaagtgcagcccggcaaccagcgcgaattcggttatgcgcaagttaaaaccatagacagcgagctgacacgcggcattcaagatggtgagccaaacacactcgacgtatggatgagccacggcgacaaagtgtccaaactgcccgacggtttcgccgtcatcggcaacaccccgtcctgcccgattgccatgatggaaaacgccgaaaaacaattctacggcatccagttccaccccgaagttacccacaccaaacaaggccgcgccctgttgaaccgctttgtcttggatatttgcggcgcacaaccgggctggacgatgccgaactacatcgaagaagccgttgccaaaatccgcgaacaggtcggcagcgacgaagtgattttaggtttgtcaggcggcgtagactcttccgtagccgccgcgctgattcaccgcgccatcggcgaccaactgacctgcgtgttcgtcgatcacggtttgttgcgcctgaacgaaggcaaaatggtgatggatatgttcgcccgcaacttgggtgtgaaagtgatacacgtcgatgccgaaaggcagtttatggcgaaactcgccggcgtgaccgatcctgagaaaaaacgcaaaatcatcggcgcggaatttatcgaagtatttgatgccgaagagaaaaaactcaccaacgccaaatggctggcgcaaggtacgatttaccctgacgtaatcgaatctgcaggcgcgaaaaccaaaaaagcccacgccatcaaatcgcaccacaacgtcggcggcctgcccgaaaacatgaagctcaagctgcttgagccgttgcgcgacttgttcaaagacgaagtgcgcgaactcggcgttgctttgggcttgccgcgcgaaatggtgtaccgccatccgttccccggccccggtttgggcgtgcgcatcttgggcgaagtgaaaaaagaatacgccgacttattgcgtcaagcagacgatattttcatccaagaattacgcaacaccaccgacgaaaacggcacatcttggtacgacctgaccagccaggcatttgccgtattcctgcctgtgaaatccgtcggcgtaatgggcgacggacgcacttacgactacgtcgtcgcactgcgcgcagtcatcaccagcgacttcatgaccgcacactgggcagaactgccttactcactgctcggacgcgtgtccaaccgcatcatcaacgaagtcaaaggcatcaaccgcgtggtgtacgatgtcagcggcaaaccgcctgccaccatcgagtgggaataa

SEQ ID NO: 71530 - DNA, 1893 bp, Neisseria meningitidis
atgcctatccttaccatccgtgaagtgtgcaacattaatcattggggcataggttattatgatgttgacgattccggcgaaatcatcgtccgccccaatccctcgcaacacaatcaaactgtttcactgcaaaaactgactgaagccgtgcaacaaaaacatcaggcgcgcctgcctgttttgttttgttttccgcaaatcctcgaacaccgcctccgcgacattaaccgcgcctttcagacggcacgggaagagtgcggctataagggcggttattgtttggtttaccctatcaaggtcaaccaacaccgccgcgtcatcgaatcgcttatgtcaagcggacaaccgcatggtttggaagctggttctaaagccgaactgatggcggttttggcacacgccggcacccggcaaacattaatcgtctgcaacggctataaagaccgtgaatatatccgtttcgccttgatgggcgaaaaactggggcatcaggtttatttggtgattgagaagctgtccgaaatacaaatggtattggaagaggcggaaaaactcggcatcaagccccgtttgggtgtgcgcgccagactggcttcccaaggttcgggaaaatggcagtcttcgggtggggaaaaatcaaaattcggcttgtcggcttcccaagttttgcaactggtcgatattttgaaacaaaaaaacaggctggactgcctgcagcttttgcatttccatttaggctcgcagcttgggaacatccgtgatgttgccacaggtgtacacgaatcggctcggttttatgttgagttgcacaaactgggggtaaatatccgctgttttgatgtaggcggcgggcttggcgtggattacgaaggaaaccgcacacaatcggattgttccgttaattacagcctcaacgaatatgccgccacagttgtatggggcatcagccaggcttgtctcgaacacgggctgccgcatccgacaatcattaccgagagcgggcgcggcattaccgcacatcacgccgttttggttgctaatgttataggcgttgaacgttacaaaccgcgccggctggatgcgccatcgcccgaagcgccgcgtgtgttgcacagtatgtgggaaacttggacggatatttccgcctcgcgggaaaaacgttccttacgcagctggatacacgaagggcagtttgatcttgccgatgtgcataatcagtataatgtcgggctgttgagtttggcgcaacgtgcgtgggcggagcaactgtatttaaatatctgtcatgaagtcggcgaattgtttaatgaaaaacaccggtctcaccgaaccattattgacgaattgcaagaacgttttgccgataagctgtatgtcaatttctcactcttccaatctttgcccgatgcttggggcatagatcaacttttccctgtttgtcccattaccggtttgaatgaaccgattgcgcgccgcgccgtgttgttggacattacctgcgattcagacggtacgattgaccactacatcgacggcgacggcatcgccggtacgatgcctatgcctgattatcccgaagaagagccgccgcttttaggcttttttatggtgggagcatatcaggaaatactcggcaatatgcacaatcttttcggcgacactgccactgctgatgttgttgtaggggaagacggacaatttaccgtcatcgattacgatgaaggaaacaccgttgccgatatgctcgaatacgtttatcaagatccgaaagagctgatgaaacgctatcgcgaacaaatcgaacattcagaccttcctgcctcgcaggctatgtctttcttaaaagaactcgaagcggggcttaatggttatacctatttggaagacgaatag

SEQ ID NO: 71531 - DNA, 759 bp, Neisseria meningitidis; identical to SEQ ID NO: 46332

SEQ ID NO: 71532 - DNA, 951 bp, Neisseria meningitidis; identical to SEQ ID NO: 54411

SEQ ID NO: 71533 - DNA, 531 bp, Neisseria meningitidis; identical to SEQ ID NO: 55452

SEQ ID NO: 71534 - DNA, 1869 bp, Neisseria meningitidis; identical to SEQ ID NO: 55320

SEQ ID NO: 71535 - DNA, 147 bp, Neisseria meningitidis; identical to SEQ ID NO: 42194

SEQ ID NO: 71536 - DNA, 549 bp, Neisseria meningitidis; identical to SEQ ID NO: 39055

SEQ ID NO: 71537 - DNA, 1362 bp, Neisseria meningitidis
atgctgaaaaaagttttaatcgccaaccgaggcgaaatcgcattacgcgtactccgtgcctgccgcgaaatgggcattgccaccgtcgccgtgcattccgaggccgacaaagacagcctgcacgtcaaactcgccgacgaatccgtgtgcatcggccctgccgcttccgcgcaaagctaccttaacgtccccgccattatcgccgccgccgaagtaagctgcgcggacgctgtccatccgggctacggtttccttgccgaaaacgccgatttcgccgaacaggtcgagcagtccggctttacctttatcggcccgaaacccgacaccatccgcctgatgggcgacaaagtctccgccaaacacgcgatgatagcggcaggcgtaccctgcgtccccggttctgacggcgcattgcccgacgacggcgaagaaatcctcaaaatcgccgataaagtcggttatcccgtcattatcaaagcctctggcggcggcggcggtcgcggtatgcgcgtggtcgagaaaaaagaagacctcctccaatctgtcgaaatgaccaaggcagaagcaggcgcggcattcggcaacccgatggtttacatggaacgctatctgcaacgtccgcgccacgtcgaaatccaagtgattgccgacgaacacggcaacgccgtatatcttgccgagcgcgactgttcgctgcaacgccgccaccaaaaagtcatcgaggaagcaccggctccgttcatcactgaaaaagaacgcgccaaaatcggcaacgcctgtgccgacgcctgcaaacgcatcggctatcgtggcgcaggtacgtttgaattcctgtacgaagacggcgaatttttctttatcgagatgaatacgcgcgttcaggttgagcatccggttaccgaactcatcaccggcgtggacatcgtgcaggagcaactccgcatcgcatccggcctgccgctgcaatacaaacagaaagacatcaaaatcgaaggccacgctttcgagtgccgtatcaacgccgaagacccgtacaacttcatccccagcccaggcccgattgaaagctgccacctgcccggtggcttcggtatccgcgtggacagccacatttaccaaggctaccgcatcccaccgtactacgacagcctgatcggcaaaatctgcgtacacggcaaaacgcgtgaacaggcaatggcgaaaatgcgcgtcgcactcgccgagctggcggtaaccggcatcaaaaccaatacgccgcttcaccgcgacctgttcgccgatgcgggtttccaaaaaggcggcgtcagcatccactatttggaacactggctggaagatcgcaaagccaaacaggacaagtaa

SEQ ID NO: 71538 - DNA, 489 bp, Neisseria meningitidis; identical to SEQ ID NO: 55374

SEQ ID NO: 71539 - DNA, 636 bp, Neisseria meningitidis; identical to SEQ ID NO: 55453

SEQ ID NO: 71540 - DNA, 699 bp, Neisseria meningitidis
atgaaatccagacacctcgccctcggcgttgccgccctgttcgcccttgccgcgtgcgacagcaaagtccaaaccagcgtccccgccgacagcgcgcctgccgcttcggcagccgccgccccggcagggctggtcgaagggcaaaactataccgtccttgccaacccgattccccaacagcaggcaggcaaagtcgaagtccttgaatttttcggctatttctgtccgcactgcgcccacctcgaacctgttttaagcaaacacgtcaagtcttttaaagacgatatgtacctgcgtaccgaacacgtcgtctggcagaaagaaatgctgacgctcgcacgcctcgccgccgccgtcgatatggctgccgccgacagcaaagatgtggcgaacagccatattttcgatgcgatggtcaaccaaaaaatcaagctgcaagagccggaagtcctcaaaaaatggctgggcgaacaaaccgcctttgacggcaaaaaagtccttgccgcctacgagtcccccgaaagccaggcgcgcgccgacaaaatgcaggagctgaccgaaaccttccaaatcgacggtacgcccacggttatcgtcggcggcaaatataaagtcgaatttgccgactgggagtccggtatgcacaccatcgaccttttggcggacaaagtacgcgaagaacaaaaagccgcgcagtaa

SEQ ID NO: 71541 - DNA, 1488 bp, Neisseria meningitidis
atgctaaagaaaataaaaaaagctctttttcagcctaaaaagttttttcaagattcaatgtggttgacaacatctccattttatcttacccccccacgtaacaatttatttgtcatatctaatttaggtcagcttaaccaagtccaaagcctaattaaaatacaaaaattaaccaataatttactagtaattttatatacttctaaaaacttaaaaatgcctaagttagttcatcaatcagctaacaagaatctatttgaatctatttatctatttgagcttcctagaagccctaataatataactcctaaaaaattactttatatttatagaagttacaaaaaaatccttaatattatacagcctgctcatctctatatgctgtcttttacaggccactactcctatctgattagtattgcaaaaaaaaagaatattacgactcatttaattgatgaagggactggaacatatgctcctttattagaatcattttcatatcatccaacaaaattagaacgttatttgattggaaataatcttaatattaaaggatatatagatcattttgacatattgcatgtcccctttcctgaatatgctaaaaaaatatttaatgcaaaaaaatataaccggttttttgcgcatgctggaggaataagcattaataataacattgcaaacttacagaaaaaatatcaaatatctaaaaatgactatattcttgttagtcaacgctaccccatttcagatgatttgtattataagagtatagtagaaatcttaaacagcataagtttacaaattaaaggaaagatatttattaaactacacccaaaagagatgggcaacaactatgtaatgtctttatttctaaatatggtagaaataaaccctcggctggtagttattaatgaacctccttttctaattgagcccctaatatacttaacaaatcctaaaggaattataggcctggcctctagttctttaatttatacaccattactctcaccctcaacccaatgtctttctattggagagttaattattaacttaattcaaaaatattcaatggtggaaaacactgaaatgatccaagaacacttagagattattaagaaatttaattttattaatatactaaatgatttaaatggggtaataagtaaccctctctttaaaacagaagaaacatttgaaacacttcttaaatctgcagaattcgcatataaatctaaaaactactttcaggctattttttactggcaacttgccagcaaaaacaatattaccttattagggcataaagcattatggtactacaatgcactttataatgtaaaacaaatttataagatggaatattcagatattttttatatcgataatatctccgtagactttcatagtaaagataaattgacatgggaaaaaattaaacattattactattccgccgacaatagaattggtagagatagataa

SEQ ID NO: 71542 - DNA, 417 bp, Neisseria meningitidis; identical to SEQ ID NO: 51640

SEQ ID NO: 71543 - DNA, 1977 bp, Neisseria meningitidis
atgaacgaattttcgcttgcccctattgtggttgttttgctggtgtcggtcattacggtgatcctgtgccgcaagttcaacattccctccatgctgggctacctgctggtgggctttttggcggggcccggtatgctcagcctgattccgaaaagccatgcgacggattatttgggtgaaatcgggattgtgttcctgatgttcagcattggtttggagttctcgctgcccaagttgagggcgatgaggcggctggtattcgggctgggcggtttgcaggtcggcgttacgatgctgtcggtaatgggcatactgatgctgacgggcgtgccgttcaattgggcgtttgccgtgtcgggcgcgttggcgatgtcgtccacggcgattgtgagccggattttgtcggaaaagacggaattggggcagccgcacggtcagatggcgatgggcgtgctgctgatgcaggacatcgccgtcgtgccgctgatgattctgattcccgcgctggcgggcggaggggacggaaatatttgggcggccttgggtttggcgtttgcaaaaatgctgctgacgctggggctgctgtttttcgtcggcagcaaaattatgtcgcgatggttcaggatggtggcaaaacgcaaatcgtccgaactctttatgatcaatgtgctgctggtaaccttgggtgtggcttatctgactgagctggaaggtttgtctatggcgttgggcgcgtttgtggcggggatgctgctttcggaaacggaataccgtttccaagtcgaagacgacatccgcccgttccgcgatattttgctcggctttttctttatcacggtcggcatgaagctggacattcaggcattgatcggcggctggcggcaggtattgatgctgttggcaatgctgctggtgttgaaggcactggttgtgtttgccattgccttcaaaatgaaacattcggtcggcgacagcctcaaaacggctttgtatctcgcacaaggcggcgagttcggcttcgtgatgctggccattgccgggcagcttgatatggtttcgccagaatgggaacaggcggcgacggcggcggtgctgctgtcgatgattatcgcacccttcctcttgggcggcagcgatgcgctggtcgggcgtttggtcaagtcaagctgggacatgaagtcgctcgatctgcacagtatgctggtagaaaccatgagcaagtccgaccatgtgctgattgtcggcttcggcaggggcgggcagacggtcggacgcgtccttgcccaagaggatattccgtatttcgcgctcgacttggacattgcgcgggtgcaggttgccagaagtgcgggcgaaccggtgtcgttcggcgatgcgaaacgcagggaagtattggaagccgccggtttggggcgggcgaaaatggtggtgctgacgctcaacaatatgcacgaaacgcaacacgttttagacaatgtgctgtccatgtatcccaatatgcccgtatatgtgcgcgccaccaacgacgattatgtgaaaacgtttaccgatataggtgcggaagaagccgtgtcggacaccaaagaaaccggactcgtgctggcaggctatgcgatgttaggcaacggcgcgtcgtaccggcacgtctatcagacgatggcaaatatccgccacagccgttatgccgcgttggagggtttgtttgtcggtagtgatgatgaggcaggattcggcgaaaatggcgaaaccgtccgccacgcctttcctttggctgcagaagcatacgccgtcggcaaaacagtcggcacgcttccgatggcggcttacggcatcaaactcttgttcgtccgccgccgcacaggccggattgaaaacccggatgcctcgtttacattggaaggcggtgacgtgttggtggtcgcaggcaaaaaagaagaaattatctcttttgaaaactggagtttgcagggaatataa

SEQ ID NO: 71544 - DNA, 216 bp, Neisseria meningitidis; identical to SEQ ID NO: 63430

SEQ ID NO: 71545 - DNA, 615 bp, Neisseria meningitidis; identical to SEQ ID NO: 36682

SEQ ID NO: 71546 - DNA, 414 bp, Neisseria meningitidis
gtgtttaccaacggctgtttcgacatcctccacagggggcatgttacttatctggcgcaggcgcgttcggcaggggcggcgttggtgctggcgttgaataccgatgcttcggtgcggcgtttgggcaagggcggcgaccgcccgattaatcctttggagaaccgtgccgccgttgccgccgcgttggaaagtgtggatttggtaacgtggtttgacgaggatacgccggcggcgttgattgaggcggtcaaacctgagattttggtcaagggcggcgattgggctgcggataagattgtcggtgcggcagaaacgttggcgcgcggcggtcaggtgttttcaattccgtttctgcaccagacttcgacaacgaagactttggcaaaaatccgtgcggcagagggcggaaaatga

SEQ ID NO: 71547 - DNA, 594 bp, Neisseria meningitidis; identical to SEQ ID NO: 63742

SEQ ID NO: 71548 - DNA, 606 bp, Neisseria meningitidis; identical to SEQ ID NO: 55864

SEQ ID NO: 71549 - DNA, 606 bp, Neisseria meningitidis; identical to SEQ ID NO: 45264

SEQ ID NO: 71550 - DNA, 696 bp, Neisseria meningitidis
atgagtgagttgattttgaaatgcgaaggcgtgggcaaacgctaccgtgacggcggtttggacgttcgggtgctgcacggcttggatttggaaatcctcgcgggggaaagtaccggcatcatcggttcttcgggcagcggcaaatcgacgctgctgcatattttgggcgggctggatatgccgtctgaaggcagggtgctgctgatgggcgaggatttgagtacattaagccagcgacaactgggcatcctgcgcaaccgccatctcggtttcgtgtaccagttccaccatcttctgcctgaattttcggcactggaaaacgtgatgatgccgcttctgatcggcaagaaaaaacgggaagaggcggcagaaacggcaatggcgatgctggaaaaggtcggattgaagcaccgttcggcgcaccgcgcgggcgaactgtccggcggtgagcggcagcgtgccgccattgcacgcgccttggttacgcaacccaaatgcctgcttgccgacgaaccgaccggcaatctcgatcgtgcgaacgccaggaatgttttggatatgatgctggaactgaaaacagaattgggaacggggctggtggtcgtaacgcacgacgacgaactcgccggccgcttcgagcgcgtgatggtcatgaaagacggcagcctgcaccccaaacagggcgcaaacgcctaa

SEQ ID NO: 71551 - DNA, 234 bp, Neisseria meningitidis; identical to SEQ ID NO: 51696

SEQ ID NO: 71552 - DNA, 1305 bp, Neisseria meningitidis; identical to SEQ ID NO: 55889

SEQ ID NO: 71553 - DNA, 564 bp, Neisseria meningitidis; identical to SEQ ID NO: 54577

SEQ ID NO: 71554 - DNA, 741 bp, Neisseria meningitidis; identical to SEQ ID NO: 54417

SEQ ID NO: 71555 - DNA, 1995 bp, Neisseria meningitidis
atgaaacgacattttatgcctaaaattttacaacaaacaaccttacatcgcttttttcgcgcaaacacgcaccatccgatcagcccgtccgttttgcagcaggctggcgatttgataagatggttatgtttttcagacggcatttcagatttccgtccatgccgtctgaagccgcaaaacccgattggaggaactgttatgaataccgtatcgaattacctgtccgcattgcgcgaagccatgaaggcgcaaggcttggacgcgctcgtcatcccttccgccgacccccacctgtccgaatacctgcccgagcattggcaggcgcgccgcgaattatcgggctttaccggctcggtcggcacgtttgtcctgaccaccgatgaagcgggcgtatgggtggacagccgctattgggaacaagccgccaagcagcttgcgggcagcggcatcgaactgcaaaaaagcgggcaagtgccgccgtataacgaatggctcgcggcaaacctgcccgaaaacgccgccgtcggcatcccttccgatatggtctcgctcaccggcaaacgcactttggcgcaatccctgaccgccaaaaacatccgcatcgaacacccggacgatctgcttgaccaagtgtggacaagccgtcccgctatccccgccgaaaccgtgttcatccacgaccccgcctacgtctccgaaaccgccgccgaaaaactcgcccgcgtgcgcgccgtcatggcggaaaaaggcgcggattaccacttggtttcctcgcttgacgacatcgcttggctgaccaacctgcgcggcagcgacgtgcctttcaatcccgttttcgtgtccttcctgctgattggcaaagacaacgccgtcctgtttaccgaacaatgccgtctgaacgccgaagccgccgccgcgctgcaaaccgccggcatcgcggtcgagccttacgcccaagttgccggcaaactcgcgcaaatcggcggcgcgctgcttatcgaaccgaacaaaaccgccgtcagcacgcttgtgcgcctgcccgaaagcgtgcgcctgattgaaggcaccaacccgtccacgctgttcaaatcctgcaaatccgaagccgacatcgcacgcatccgcgaagcgatggaacaagacggcgcggcgttgtgcggcttcttcgccgagtttgaagacatcatcggcaacggcggcagcctgaccgaaatcgacgtggatacgatgctctaccgccaccgcagcgagcgtccgggctttatttcattgagtttcgacaccatcgcaggcttcaacgccaacggcgcactgccgcattacagcgcgacacccgaaagccacagcaccatcagcggcaacgggcttttgctcatcgactccggcgcgcaatacaaaagcggcacgaccgacatcacccgcgtcgtccctgtcggcacacccaccgccgaacaaaaacgcgacaacaccctcgttctcaaagcccatatcgcgcttgccgaagccgtgttcccagaaaacatcccctcaccgctgatagacgcgatttgccgcaaacccctgtggcaggcgcaatgcgactacggccacggcaccggacacggcgtaggctatttcctcaacgtccacgaaggcccgcagcgcatcgccttcgccgcccccgccacgcccgaaaccgccatgaaaaaaggcatggttacctccatcgaacccggactctaccgcccgggaaaatggggcatccgcattgaaaaccttgccgccaaccaagccgtcgccgcccctcaagaaaccgaattcggcagcttcctctgttttgaaaccctgaccctctgccccatcgatacacgcctgatggacaccgccctcatgaccgacggcgaaatcgactgggtcaaccactaccacgccgaagtccgccgccgcctcgagccgctgaccgaaggcgcggcaaaagcgtggctgatcaaacgcaccgaaccgctggagcgttaa

SEQ ID NO: 71556 - DNA, 345 bp, Neisseria meningitidis; identical to SEQ ID NO: 36231

SEQ ID NO: 71557 - DNA, 267 bp, Neisseria meningitidis; identical to SEQ ID NO: 42326

SEQ ID NO: 71558 - DNA, 2631 bp, Neisseria meningitidis
atgcaagaacattaccaacccgccgccatcgagcctgcggcgcagaaaaaatgggacgacgcccgtattttcaacgtctccgaagacgcttccaaacccaaatactactgcctctccatgttcccctaccccagcggcaagctgcacatggggcatgtgcgcaactacaccatcggcgacgtattgagccgcttcaaacgcttaaacggcttcaacgtcatgcagcctatgggttgggacgcgttcggtatgcctgcggaaaatgcggcgatgaaaaacaacgtcgcccccgccgcttggacgtacgacaacatcgaatacatgaaaacccagctcaaaagcctgggttttgcgattgactgggcgcgcgaaaccgcaacctgcaaacccgaatactaccgctgggaacaatggctgtttaccaagctgtttgaaaaaggcatcgtctatcgcaaaaacggcacggtaaactgggaccctgtcgaccaaaccgtccttgccaacgagcaagtcatcgacgggcgcggctggcgttcgggcgcgttgatcgaaaaacgcgaaatcccgatgtattacttcaaaatcacggattacgccgaagagttgctcaacgatttggacaagctggaacactggccggaacaagtcaaaaccatgcagcgcaactggatcggcaaatcgcgcggcatgaccgtgcgcttcgccgtttccgacgacagcaaacagggcttggaaggcgattacgcgaaattcctgcaagtttataccacccgccccgacacgctgatgggcgcgacttatgtcgccgttgccgccgagcatccgctggcaaccgccgcagccgccgacaaacctgaattgcaggcatttatcgccgagtgcaaagccggctcggttgccgaagccgatatggcgacgatggagaaaaaaggcgtgccgaccggccgctacgtcgtcaacccgctcaacggcgacaagctggaagtgtggattgccaactatgtattgtggggctacggtgacggcgcggtcatggcggttccggcgcacgacgaacgcgatttcgagttcgccgccaaatacagcctgccgaaaaaacaagtcattgccgtcggcgacaacgcattcgacgcaaaccgatggcaagagtggtacggcgacaaagaaaacggcgtattggtcaacagcggcgacttggacggcttggattttcagacggcattcgatgccgttgccgccaagctgcaaagccaaggcgcgggcgaaccgaaaacccaataccgcctgcgcgactggggcatttcgcgccaacgctactggggctgcccgattcccatcgtccattgcgaacaatgcggcgacgtacccgtcccagccgaccaactgcccgtcgttttgcctgaaaacgtcgtacccgacggcatgggttcgcctttggcaaaaatgcccgagttttacgaaaccgcctgcccatcatgcggcggcgcggcgaaacgcgaaaccgacaccatggacaccttcatggaatcgagctggtacttcttccgctacatgtcgcccaagttttcagacggcatggtatcggctgaagccgcaaaatactggggcgcggtcgaccaatacatcggcggcatcgaacacgcgattttgcacctcttgtacgcgcgtttcttcaccaaactgatgcgcgacgaaggtctagtcaatgttgacgaaccgtttgaacgcctgctgacgcaaggcatggtcgtttgcgaaacctactaccgcgaaaacgacaaaggcggcaaagattggatcaaccccgccgatgtcgagctgacgttcgacgacaaaggccgccccatttccgccgtcctcaaagccgacgggctgcccgtcgtcatcagcggcacggaaaaaatgtccaagtccaaaaacaacggcgtcgatccgcaagaactgattaacgcctacggcgcggacaccgcccgcctgtttatgatgttcgccgcaccgcccgaacagtccctcgaatggagcgacagcggcgtcgaaggcgcacaccgcttcctgcgccgcctgtggcgtaccgtttacgaatacttgaagcaaggcgaagcggtcaaagcgttcgcaggcagccaagacggtttgtctaaagaactcaaagacctgcgccacaaactgcacgcgaccactgccaaagtcagcgacgactacggccgccgccagcagttcaacaccgccatcgccgccgtgatggaattgctcaaccaatacgacaaaaccgacaccggcggcgaacaaggacgcgccgtcgcccaagaagtattggaaaccgccgtacgcctgttgtggcccatcgtgccgcacatctgcgaaaccctgtggagcgaattgaacggcgcgaaactgtgggaagcaggctggccgacagtcgacgaagccgccttggtcaaatccgaaatcgaagtgatggttcaagtcaacggcaaactgcgcggcaaaatcaccgtcgccgccgacgcctccaaagccgacctcgaagccgccgcccttgccactgaaggcgcggtgaaattcatggaaggcaagcccgcgaagaaaatcatcgtcgtaccgggcagactggtgaacatcgtcgtctaa

SEQ ID NO: 71559 - DNA, 864 bp, Neisseria meningitidis; identical to SEQ ID NO: 50275

SEQ ID NO: 71560 - DNA, 867 bp, Neisseria meningitidis; identical to SEQ ID NO: 50829

SEQ ID NO: 71561 - DNA, 918 bp, Neisseria meningitidis; identical to SEQ ID NO: 37376

SEQ ID NO: 71562 - DNA, 453 bp, Neisseria meningitidis
atggcaaaaccgctcaaataccccgtctccgcactggtcgtactccatgacggggacggcggcatcctcctcatcgaacgcacgcatccgaaaggattttggcagtcggtaaccggcagcctcgaaccgggcgaaaccgtcgcccaaacggcaaggcgcgaagtttgggaagaaaccggcatcctgctggcggacgggcagcttcaagactggcacgacagcacggtttacgaaatctaccaccactggcggcaccgctatccaaaaggcgtgtttgaaaaccgcgaacacctcttctctgccgaaatcccgcgtgatacgcccatcgccctgcaacccgaagaacacgtctcctacggctggttcggcttggaagaagcggcggaaaaagtgttttccccgtccaacaggcgcgcgattctggaactgggcaggtttttgggcaaacggtaa

SEQ ID NO: 71563 - DNA, 1116 bp, Neisseria meningitidis
atgcgcttgtttaaaagcttgaaaaaccctaaaaaaacagatgccaagctccctaaaaaatcttcgggactcaataaccgcgcggcaatcggcatcgatatcgaccagcattccatcaaaatggtccaattgtcaggacgtagtttaaaccaaattcaattggaaaaatacgtcattgccaaattaccaaagaatatcattcaaggcaataaagtccaaaattacgatcaacttgttacatatttgcaacaagcctatgccaaactgggtacttcgtgcaaaaacatcatcgcgtccgtcccgcaaaatctggcaaccatcgaacaattgacctacacagacaaagatgcagaattagacctgcaggggttcgtggagtcctccatctccgaagtcagctcgatatcgctcgaagaagccaattacgactatcaggtcttgtcccaatcggccgccggcgaagctgtgttggccgtcgcatcgagaaaggatgaaatcgaacccctgattgacgcattcaacgccgccggtatgaaattatccgcgcttgatgtggacattttcggacaatacaacgcctacgcgctatggataaaccatttcgcccccgagcttgcggccgaaaaagtcgccattttcggcgtatatgccgcacagacctacgccttggtcatccaagacggaaaactcctatacaaacaggaaacctccgtcagcgaagaacagctcaaccaactcatccagcacacctatcaggtaacagaagaaaaagcggaagaaatcatcaactccccgcaaaaaccttccgattaccaagaaagcgtggcaaactatttcaaccagcagattacccaagaaatacaaagggtcttgcagttttattacaccacgcagaccgcagacgatatgaccgacatcaagcatatcctgctgaccggggaagcggcgcgccaggaaggcatcgcccaaaccgtcgcctcacaaaccaatgcagatgtacaatgcgtccatcccgcgcgttattttgcggacaacctcaaaacagacaaacaacaattcgaacttgatgcgccgacactgaccagggcgttcggtttggcggtacggggattataa

SEQ ID NO: 71564 - DNA, 1620 bp, Neisseria meningitidis
atggacaatctcgtatgggacggcattcccgacatccgcacactcgaccaaaccatccgcaaacacgcacacccgctcaacctgattgtctgcctccccgataatcagattcccgattttcaaaccgcacaagatgcttcggacgcggaatgccgtctgaagcaccgtttggatcaggcaacgcagtgcctccagttcgacagcatcaacctcatcgaacacatcctgcccgatgtccgcttctggctggttcccccttcacgcacccgccgcctgcacgaacacttccaccacatttcctggcagaccgaagccatcccgcaaaccgaaagtaagcccgacaaaccctggtttgcacttccacaaacatccgaacggcaaaaaccggaacacatcctcgttatcggagcgggcatatccggcgcggcaaccgcccacgccttagcatcatacggcatttccgttaccgtattggaagcccgaaaagccgcccaagccgccagcggcaaccgccaagggctgctctacgccaaaatctcgccgcacgacaccgaacaaaccgaactgctgcttgccggctacggctacaccaaacgcctgctcggacatatcctgcccgaatccgaaacctggggcggcaacggcatcatccacctcaattacagccgcaccgaacaacaacgcaatcacgaattgggtttgcaaaaacaccataaccacctctaccgcagcatcacatctgcagaagccgaaaaaatcgccggtatcccactgtccgtcccatacgaccacccttcatgcggactctactggcaacacggcgtatggctcaatccacccgcattcgtccgcaccctcctcaaccatccgctcattggactacacgaagacacaccgttaaccgacatttcccacgacggggaaaagtggattgcaagcacgccaaacggcatattttccgccacacacatcatctactgcaccggcgcgcacagcccccgcctgcccgaaaccaacctcgccgccctgcctctcaggcaaatacgcggacaaaccggcctcacaccgtccaccccgttttccgaacaactgcgttgcgccgtttcaggcgaaagctacatcagcccgtcgtggcacggactgcactgctacggcgcgagttttattcccaacagcagccataccggatggaacgaagccgaagaagcctcaaaccgccaagcattggcacaccttaaccccgccctttccgaatcattgtttgccgccaacccaaacccccaaaaacaccaagggcacgccgccatacgctgcgacagccccgaccaccttcccctagtcggcgcactcggcgacattgccgccatgcggcagacctacaccaaactcgcgctggacaaaaactaccgcatcgacaccccatgcccatacctgcctaatgcctacgtcaacaccgcgcacggcacccgcggactcgccaccgcccccatctgcgccgccgccattgcagcccaaatcctaggcttgccccatcccctctcaaaacgcctgcgccacgccctacaccccaaccgcaccatcatccgcgccatcgtcagaaggaaggatctaaccccttaa

SEQ ID NO: 71565 - DNA, 738 bp, Neisseria meningitidis; identical to SEQ ID NO: 55381

SEQ ID NO: 71566 - DNA, 762 bp, Neisseria meningitidis
atgatgggcgattccgtcatttattatgtagaacaggcagacaaaccggtaaaccgtgccggcgaacgcgcccgtaaaacattcaaatatttttggcgcgagcttttttgggaacgccgccgcatcattcccgccttagattttgccatggtcaaagccccttttttccaagacggcgaagacggcgaaatttgcgaacatatgtggatcgacgatatttattttgacggtctttacatttatggcgtgctgaacaatgaacccggcgaactgaccaatgtcgaacaaggcgaaagcgtttgcgttccggttgacgacatcagcgactggatgttcgtgtgcaacggcattccctacggcggctttaccgtacaggcaatgcgcgggcagatgacggaagaggagcgcaccgaacacgatgccgcatggggaatcgatttcggcgatccctggcaggtattgctggcgtatgaagaaaaagaacatcccgaaaatctggaagagcatccgatgtgccggaactgtattgacgattttcggcaacagttgtcccaaaatccggattttctgcatgagcaggacgaagacggctatacgccgcttcatcatgacgccatcgcaggaaatgcacttatggttaaagctatgcttgaatacggcgcaaatcctgcctcaacgacatcggaaggctataccgccctcgattttgcccgcctgacgggctggcaaaatgttgccgacctgcttgaaccgcgacattag

SEQ ID NO: 71567 - DNA, 315 bp, Neisseria meningitidis; identical to SEQ ID NO: 54641

SEQ ID NO: 71568 - DNA, 684 bp, Neisseria meningitidis; identical to SEQ ID NO: 46781

SEQ ID NO: 71569 - DNA, 648 bp, Neisseria meningitidis; identical to SEQ ID NO: 55792

SEQ ID NO: 71570 - DNA, 513 bp, Neisseria meningitidis; identical to SEQ ID NO: 40766

SEQ ID NO: 71571 - DNA, 633 bp, Neisseria meningitidis; identical to SEQ ID NO: 55110

SEQ ID NO: 71572 - DNA, 1272 bp, Neisseria meningitidis
gtgggcgacggtgtccacactctgctgctcgacaggccgattgtgcgcgacggcaggaaattcgacgcgccgcttttgtggatggtggtgctgatgacggcgttcagcctgctgatgatttattcggcttctgtgtatttggcatcaaaagaaggcggcgatcagtttttctatttgaccagacaggcggggttcgtcgttgccggcttgatagcgagcggtttgttatggtttctttgcaggatgaggacatggcggcggcttgtgccgtggatttttgccctatccggcctgttgctggtagtcgtattgattgccgggcgcgaaatcaatggcgcgacccgttggatacctttgggtccgttgaatttccagccgaccgagctgttcaagctggcggtcatcctttatttggcaagcctgttcacgcgccgtgaagaagtgttgcgcagcatggaaagtttgggttggcagtcgatttggcgggggacggccaatctgatcatgtccgccaccaatccgcaggcacgtcgtgaaacattagaaatgtacggccgtttccgggcgatcatcctgccgattatgctggtggcgttcggtttggtgctgataatggtacagccggatttcggttcgtttgtcgtcattaccgtcattgccgttggaatgctgtttttggcaggattgccgtggaaatattttttcgtcctggtaggcagtgtcttgggcgggatggtgctgatgattaccgccgctccctaccgtgtgcagcgggtagtggcatttttggacccgtggaaagaccctcagggtgccggctaccagcttacccactctctgatggcaatcgggcgcggagagtggttcggtatgggtttgggtgcgagtttgagcaaacgcggctttctgccggaagcgcataccgattttatttttgccatcatcgccgaagaattcggtttcttcggtatgtgtgtgctgatattctgttacggctggctggtggtgcgggcgttttccatcggcaagcagtcgcgcgatttgggtttgactttcaacgcctatatcgcctcgggtatcggcatttggatcggtatccaaagtttcttcaatatcggtgtgaacatcggtgctttgccgaccaaaggtctgacgctgccgttgatgtcctatggcggttcgtcagtctttttcatgctgatcagcatgatgctgctgttgcgtatagattatgaaaaccgccggaaaatgcgcggttatcgggtggagtaa

SEQ ID NO: 71573 - DNA, 1794 bp, Neisseria meningitidis
atgaaaaatatccgaaatttctccatcattgcccacatcgaccacggcaaatcgacgcttgccgaccgcttcatccaatattgcggcggtttggatttgcgcgaaatgagtacgcaggtactcgattccatggacatcgaaaaagagcgcggcattaccatcaaagcgcaaaccgccgcgctcaactataaagcgcgcgacgggcaggtgtatcagcttaatttgattgacacgccgggacacgtcgacttctcttacgaagtttcccgttcgctgtcggcttgcgaaggcgcgcttctggtcgttgacgcgtcgcagggcgtggaagcgcaaaccgtagcgaactgttacaccgcgattgatttgggcgtggaggttgtgcctgttttaaacaaaatcgacctgcccgccgccgaccccgagcgtgtggaacaggaaatcgaagacatcatcggcatcgatgccgtcggtgcagtacagtgttccgccaaaagcggtatcggcgtggaagatgttttggaagaaattgttgccaaaatccctgcgccgaccggcgacgaaaacgcgccgctgcaagcggttatcgtcgattcgtggtttgacaactatgtcggcgtggtcatgctgattcgagtgaaaaacggcaccatcaaactgaaagacaaagtgcgctttatgagcaccaaggcggaaacgcaggtcgagcagctgggcgtattcacaccaaaatcagttcaaaaacaagaactcaaagccggcgaagtgggctttttgattaccggcgtaaaagaattgggtcaggcgaaagtcggcgatacggttacactggttgccaaccctgccactgagccgctgcccggcttccaagaagtacaaagccaagtattcgccggactttatcccgtggaaagccacgactacgaagccttgcgcgacgctttggaaaaattgcagcttaacgacgcttcgttgaaattcgagcctgaagtttcccaggcattgggcttcggcttccgttgcggcttcttgggtctgttgcacttggaaatcgtgcaggaacgcttggagcgcgagttcgatatggatttgattaccaccgcgccgacggtggtttatgaagtcgtgttgaaaaacggtgagaaaatcgaagttgaaaacccgtccaaactgcccgacatcggcagcatcgaaaccatactcgagccgattattaccgcgaccatccttgtgccgcaggaatacgtcggcaacgtcatgactttgtgtaaccaaaagcgcggcgttcaggtcaatatgcagtacatgggccgccaagtgatgctgacttacgatttgcccatgaacgaagtcgtcatggacttcttcgacaaactcaaatccacttcgcgcggttatgcttcgttggactaccatttcaaagagttccaaccgtctgatttgattaagctggatattatggtcaacggcgaaaaagtcgatgccttaagcctgattgtgcaccgtcaaagcgcggttcaccgaggccgcgagctggcatcgaaaatgcgcgagctgattccgcgccaaatgttcgacattgccgtccaagccgccatcggcagccagattatcgcccgcgaaaacgtcaaagcactgcgtaaaaacgtcttagcgaaatgttacggcggcgatattacgcgtaagaaaaaactgcttgaaaaacaaaaggcaggtaaacgccgtatgaaacaagtgggcaatgtggaaattccgcaaagcgcgttcttggcgattttgcaggtgagcgacaaataa

SEQ ID NO: 71574 - DNA, 783 bp, Neisseria meningitidis; identical to SEQ ID NO: 38566

SEQ ID NO: 71575 - DNA, 1167 bp, Neisseria meningitidis
atgagaaaattcaatttgaccgcattgtccgtgatgcttgccttaggtttgaccgcgtgccagccgccggaggcggagaaagctgcgccggccgcgtccggtgagacccaatccgccaacgagggcggttcggtcagtatcgccgtcaacgacaatgcctgcgaaccgatggaactgaccgtgccgagcggacaggttgtgttcaatattaaaaacaacagcggccgcaagctcgaatgggaaatcctgaaaggcgtgatggtggtggacgagcgcgaaaacatcgcccccggactttccgataaaatgaccgtcaccctgttgccgggcgaatacgaaatgacttgcggtcttttgaccaatccgcgcggcaagctggtggtaaccgacagcggctttaaagacaccgccaacgaagcggatttggaaaaactgtcccaaccgctcgccgattataaagcctacgttcaaggcgaggttaaagagctggtggcgaaaaccaaaacctttaccgaagccgtcaaagcaggcgacattgaaaaggcgaaatccctgtttgccgacacccgcgtccattacgaacgcatcgaaccgattgccgagcttttcagcgaactcgaccccgtcatcgatgcgcgtgaagacgacttcaaagacggcgcgaaagatgccggatttaccggcttccaccgtatcgaatacgccctttgggtggaaaaagacgtgtccggcgtgaaggaaattgcagcgaaactgatgaccgatgtcgaagccctgcaaaaagaaatcgacgcattggcgtttcctccgggcaaggtggtcggcggcgcgtccgaactgattgaagaagtggcgggcagtaaaatcagcggcgaagaagaccggtacagccacaccgatttgagcgacttccaagccaatgtggacggatctaaaaaaatcgtcgatttgttccgtccgttgatcgagaccaaaaacaaagccttgttggaaaaaaccgataccaacttcaaacaggtcaacgaaattctggcgaaataccggactaaagacggttttgaaacctacgacaagctgggcgaagccgaccgcaaagcgttacaggcctctattaacgcgcttgccgaagaccttgcccaacttcgcggcatactcggcttgaaataa

SEQ ID NO: 71576 - DNA, 1518 bp, Neisseria meningitidis
atgttgtatttcagatacggctttttggttgtttggtgtgcggcaggtgtttctgccgcctatggggcggatgcgcccgcgattttggatgacaaggcattgttgcaggtgcagcggtcggtgtcggataagtgggcggaatcggattggaaagttgaaaatgatgccccgcgcgtggttgacggggattttttgttggcgcacccgaaaatgttggaacatagtttgcgcgacgcgctcaacggcaatcaggcggatttaatcgcttcgttggcggatttgtatgccaagctgccggattatgatgcagttttgtacggcagggcgcaggctttgctggcgaaattggcgggaaggccggcggaggcggtggcgcggtatcggaagctgcacggggaaaatgcggcagacgagcggattttgctggatttggcggcggcggagtttgacgatttccggctgaagtcggcagaaaggcattttgcggaggcggcaaaattggatttgccggcgccggttttggaaaatgtggggcgttttcggaaaaaaacggaggggctgacgggctggcgtttttcgggcggcatcagcccggcggtcaatagaaatgccaataatgccgcgccgcagtattgccggcaaaacggaggccggcagatatgcagtgtcagccgggcggagcgggcggcagggttgaattatgaaatcgaggcggaaaaactgacggcgttggcagataatcattatttgttgttccgttccaatatcggcggcacgagctattatttcagtaaaaaatcagcttatgatgacgggttcggcagggcgtatttgggttggcagtataaaaatgcgcggcagacggcggggattttgccgttttatcaggtgcagttgtcgggcagcgacggctttgatgcgaaaacaaaacgggtaaacaaccgccgcctgtcgccgtatatgctggcgcacggagtcggcgtgcagctgtcccatacttaccgcccaaacccgggatggcaattttcggtcgcgctggaacattaccgccaacgctaccgcgaacaggatagggcggaatacaataacggccggcaggacgggttttatgtttcgtcggcaaaacgtttgggcgaatcggcaactgtgttcggcggctggcagtttgtgcggtttgtgccgaaacgcgaaacggtgggcggcgcggtcaataatgccgcctaccggcgcaacggtgtttatgccggttgggcgcaggagtggcggcagttgggcggtttgaacagtcgggtttccgcgtcttatgcccgccgcaactataagggcgttgcggctttctcgacagaggcgcaacgcaaccgcgaatggaatgtctcgctggctttgagccacgacaagttgtcgtacaaaggtatcgtgcccgcgttgaattatcgtttcggcaggacggaaagtaatgtgccgtatgcgaaacgccgcaacagcgaggtgtttgtgtcggcggattggcggttttga

SEQ ID NO: 71577 - DNA, 855 bp, Neisseria meningitidis; identical to SEQ ID NO: 55482

SEQ ID NO: 71578 - DNA, 1806 bp, Neisseria meningitidis
atgcgtaaggtgtgtgcttcagcacgcacgcgttccatgatttacggctcaatgccgtctgaaaagctcacaatttttcagacggcatttgttatgcaagtaaatattcagattccctatatactgcccagatgcgtgcgtgctgaagacaccccctacgcttgctatttgaaacagctccaagtcaccaaagacgtcaactggaaccaggtacaactggcgtacgacaaatgggactataaacaggaaggcttaaccggagccggagcagcgattattgcgctggctgttaccgtggttactgcgggcgcgggagccggagccgcactgggcttaaacggcgcggccgcagcggcaaccgatgccgcattcgcctcgctggccagccaggcttccgtatcgctcatcaacaacaaaggcaatatcggtaacaccctgaaagagctgggcagaagcagcacggtgaaaaatctgatggttgccgtcgctaccgcaggcgtagccgacaaaatcggtgcttcggcactgaacaatgtcagcgataagcagtggatcaacaacctgaccgtcaacctggccaatgcgggcagtgccgcactgattaataccgctgtcaacggcggcagcctgaaagacaatctggaagcgaatatccttgcggctttggtgaatactgcgcatggagaagcagccagtaaaatcaaacagttggatcagcactacattacccacaagattgcccatgccatagcgggctgtgcggcagcggcggcgaataagggcaagtgtcaagatggcgcgataggcgctgcagtcggtgagattgttggtgaggctttggttaagaatactgatttcagtcgtatgagtgcgaccgaaatcgaaaaagctaaagcgaagattactgcctattcaaaactggttgccggcactgcgtctgccgttgtaggcggggatgtgaatacagcggcgaatgcggctactgtggcggtggagaataatactttgtatcctagatgcgttggtgcaaagtgtgatgaatttcaaaaggaacaacaaaaatggatacgtgaaaatcctgaagaatatcgagaagttttgcttcttcagacaggatttattccaattatcggtgatatacagagttttgtacaagcacagaccgctgccgatcacctgtttgctttgctgggtgtggttccgggtatcggtgaatcgatacaggcctataaagtagcgaaagcggcaaaaaatttacaaggcatgaaaaaagccttggacaaggcagcaaccgttgccactgcacagggctatgtcagtaaaaccaaaatcaaaatcggtcaaactgaattaagggttactgcagcaactgacaaacaattgctgaaagctattggcgaaggaagggacacgacaggtaaaatgaccgagcagttatttgactctttagctaaacaaaatggcttcagagtgctttcgggcggcaaatacggcggaaataacggttttgatcatgtatggcaggctgccgatggtagtgtcgttttgattgtagaaagtaagcagattaggaacggtacggtacagctgaatccgaatggtgcgggtggatatacgcaaatgagtgaggattggattagacaagttttagatcaattacccgatggtagtcccgctaaagctgctgtcttcaaagcaaataagaacggcacattaaaaacagcaatagcaggcgttgatcgtcaaacaggtaaggccgttattcttcctgtcaaagttccttctaaagccaatataaggagataa

SEQ ID NO: 71579 - DNA, 384 bp, Neisseria meningitidis; identical to SEQ ID NO: 55227

SEQ ID NO: 71580 - DNA, 486 bp, Neisseria meningitidis; identical to SEQ ID NO: 43447

SEQ ID NO: 71581 - DNA, 1662 bp, Neisseria meningitidis
atgacagaatccatcacccgcgacagtatgcaatacgatgtcgtgattgtcggcgcaggcccgtcgggtttgtccgccgccatcaaactcaagcagcttgccgaacagaacgggcgcgaaatcagcgtttgcgtggtggagaaaggttcggaggcgggtgcacattcgctggcgggcgcggttatcgatccgattgcgctgaatgagttgattcccgactggaaagaaaaaggcgcgccgctgacgcgtacggtaacgcaggacaaagtgttgttcctgactgagaaaaaagcgttcaatctgcctattaccccaaatttcgacaatcacggcaactacatcgtcagcttgggcgaagtcgtgcgctggttggcggagcaggcggaaaatatgggcgtggaaatctatccgggctttgccgccgccgaagtgctgtatcacgaagacggttcggtcaaaggcattgcaaccggcaatatgggcattggcaaagacggcgagccgaccgattcattccaacccggcatggagctttgggcgcagcaaaccctgtttgccgaaggttgtcgcggttcgctttccaaacaaatcatcgaacgcttcaaactcgaccaaaacagccagccgcaaacttacggcttgggcattaaagaagtttgggaagtgccgtccgaacagcatcagcccggtttggtggtgcacagcgcaggctggccgctggacagcaaaacctacggcggcgcgtttgtttaccatttcgatgacaacaaagtcgccgtcggcttcgtggtcggtttggactatcaaaatccttatctgtcgccgtttgaagagttccaacgtttcaaaacccatcccgaaatccgcaaaacctttgaaggcggccgccgcattgcttacggcgcacgttcgctgattgaaggcggtttgcaaagcctgccgaaactctcgttcaaagggggcattttggtcggcgatgcggcgggtttcctcaatatgccgcgcatcaaaggcattcataccgcgatgaaatccgccatgctcgccgccgaagccgtgttccccttgttggaaaaccttgaagaagtggaaaacttcgacagcggcaaagaggcggcggattatcagcaacgttttgaacaaagctggctgtatcaagagctttacgccgcgcgcaatgtccgtccgtcattcaaatggggcgtttacctcggctcaatctacaccggcatcgatcagatgattttcagaggcaaagccccgtggaccttgaaacatcacggcaaagacaacgagcagctcaaaaaagccgccgcgtgcaagccgattgattatccgaaacccgacggcgtgttgaccttcgaccgcttgagcagcgtcttccttgccaatctcgcgcacgaagaaaaccagcccgaccatttggtgctgaacaatccgcaaacgatgatagacgtgaactacaaagaatacgcctcgcccgaaacgcgctattgtccggccggcgtgtacgaaattgttgaagaaaacggcaatccgcgcctgcaaatcaacgcggcaaactgcgtgcactgcaaaacctgcgatatcaaagacccgacgcaaaacatcacttggatttgccccgaaggcgcgagcgggccgaattacggcgggatgtga

SEQ ID NO: 71582 - DNA, 306 bp, Neisseria meningitidis; identical to SEQ ID NO: 43025

SEQ ID NO: 71583 - DNA, 681 bp, Neisseria meningitidis; identical to SEQ ID NO: 55189

SEQ ID NO: 71584 - DNA, 1275 bp, Neisseria meningitidis; identical to SEQ ID NO: 54578

SEQ ID NO: 71585 - DNA, 1113 bp, Neisseria meningitidis
atgcaaaccgccgcccgccgctcgttcgattacgatatgcccctcatccaaacaccgacttccgcctgccaaatccgtcaggcgtgggcgaaggttgccgacacgcccgaccgcgagacggcaggtcgtctgaaagacgaaatcaaggtcttgctgaaggagacaaacgcggtcttggtggcgcattattacgtcgatccgctgattcaggatttggctttagaaacgggcggatgcgtgggcgattcgctggaaatggcgcgcttcggtgcggaacacgaagccggtacgctggtggtggcgggcgtgcgtttcatgggcgagagcgcgaaaatcctctgccctgaaaaaacggtgctgatgcctgatttggaggcggaatgttctttggatttgggttgtcccgaagaagcgttttcggcgttttgcgaccaacaccccgaccgcacggtggtggtgtacgccaacacttccgccgccgtgaaagcgcgtgccgattgggtggtaacgtcttcggtggcgttggaaatcgtgtcgtatctgaaatcgcgcggcgagaaactgatttggggacccgaccgccacctcggcgactatatccgccgcgaaacgggcgcggatatgcttttgtggcagggttcgtgcatcgtccataacgaattcaaggggcaggaattggcggcattgaaggcggagcatcccgatgcagtggtgctggttcatcccgaatcgccgcaaagcgtcatcgaactgggcgacgtggtcggctcgaccagcaagctgctcaaagccgccgtatcgcgccctgaaaaaaaattcatcgtggcgaccgatttaggcatcctgcacgaaatgcaaaagcaggcgcccgacaaagaattcatcgccgcgccgacggcaggcaacggcggaagctgcaaaagctgcgcgttctgcccgtggatggcgatgaattcgctgggcggcatcaaatacgccctgacaagcggacacaacgaaatcctgttggacagaaagctgggcgaagccgccaaactgcctttgcagcgtatgctcgacttcgcggcaggactcaaacgcggggatgtgttcaacggcatggggcccgcctga

SEQ ID NO: 71586 - DNA, 834 bp, Neisseria meningitidis; identical to SEQ ID NO: 70241

SEQ ID NO: 71587 - DNA, 1446 bp, Neisseria meningitidis; identical to SEQ ID NO: 44533

SEQ ID NO: 71588 - DNA, 798 bp, Neisseria meningitidis
atgctgaaacaacgggtaataaccgctatgtggctgctgccgctgatgctgggcatgctgttttacgcgccgcaatggttgtgggctgcattttgcggactgattgccctgattgccttgtgggaatatgcccgtatgggcggtttgtgcaaaattaaaaccaaccattacctcgccgcaaccttggttttcggcgtggttgcctatgcgggcggctggatgctgcctaatttggtttggtatgttgttttggcattttggctcgccgttatgcctttatggttgagattcaaatggaggctcaacggcggttggcaggtttatgccgccggctggcttctggtcatgccgttttggttcgcgctcgtatccctgcgcccgcatcccgatgatgccctgccgctgctcgccgtgatgggtctggtctgggttgccgacgtttgcgcgtatttcagcggcaaggcgttcggcaaacacaaaatcgcgccggcaatcagccctggcaaaagctgggaaggcgcaatcggcggcgcggtttgcgtggccgtgtacatgaccgccgtacgaagtgccggctggctggcattcgatacaggctggttcgataccgtgttaatcggtttggtgttgaccgttgtcagcgtatgcggcgaccttttggaaagctggctcaagcgcgcggcaggcatcaaagacagcagcaacctgctgcccggacacggcggcgtgttcgaccgcaccgacagcctgattgccgttatcagcgtctatgcggcgatgatgtcggttttaaattga

SEQ ID NO: 71589 - DNA, 426 bp, Neisseria meningitidis; identical to SEQ ID NO: 42184

SEQ ID NO: 71590 - DNA, 753 bp, Neisseria meningitidis; identical to SEQ ID NO: 38392

SEQ ID NO: 71591 - DNA, 216 bp, Neisseria meningitidis
  misc_feature 193, 194, 195, 196, 197: 'n' is a, c, g or t
atgggctatcgtgtcggcataaattgttttgatacaagattgcaggcagacgactatttattgtcgtcccttcctcctactgttacccaggacggaaaaatcatcaggccggaaagggtgggcgataaatggattttgaacggaaagccggttacgttgtcttatccgaaatgttcgaattttgagcagatannnnncacacacttaattaattaa

SEQ ID NO: 71592 - DNA, 564 bp, Neisseria meningitidis
atgcgccatttggaaaacaacggctatgcgaacgttgccggattggaacgcatcctcgccgtcaaaaccgacaattacaaagaaaaagaaaacctgctccatgaaattttcagcaaaagcaggataggcgataccgaattgttcgccgtggacgaaaaccttgtaaaacgtttgtttttatcgcttcgcggcgaaatcgtgtttccgaaaaacgaaacggcggaatcggaatttgaaaaaagcgtccacgaacgcaggcaggaagggaatgccggatccggtcgcaaacaactgcttgatttggtacggcgcggacaccgggaatacccttacgcgctgccccggcttttggcgggcgcggcatcctacaagccgaaaaaatcgaaaatccgcctttttaaagaagcatatttcggcaaaagcggcacgaggctgaccgacgaaattgcagacggcatccatatttacacctgtttttcgcgggcggatttggaaaaagcctattccgaatatttggaacttttcaaatccgaatcggatgccgaaggcagaaagccgcagtaa

SEQ ID NO: 71593 - DNA, 594 bp, Neisseria meningitidis
atgtctgaattattaaactatgttgcttcctgccgcctgccgaccgaatggggcgtatttacgatgcacggctttgaagaggcaaatgggcaggaacacgtcgcgctgaccgtcggtgatttttcagacggcaatccggttctgacgcgcatccactccgaatgcctgacgggcgatgcgctgttctcgagaaaatgcgactgcggacctcaacttgaagcggccatgagggccgtacagacagaggggcgcggcatcatcgtctatctgcgtcaggaaggacgcggcatcgggctgattaacaaaatccgcgcctatcatctgcaagaccaaggtatggatacggttgaagccaatttggcactcgggctgcccgtcgatgcccgcgatttccgtttggcgcaatctatctacgaatatctgggcatccgctcggtcaaactgctgaccaacaaccccgaaaaaatccaaaccctgaaagatgcggggattaacgtgttcgaacgcatccccctgcacgtcggggaaaaccttgaaaacaaacgctacctccaaaccaaagcagacaagctgggacatctgatgtcggaataa

SEQ ID NO: 71594 - DNA, 285 bp, Neisseria meningitidis; identical to SEQ ID NO: 47739

SEQ ID NO: 71595 - DNA, 552 bp, Neisseria meningitidis; identical to SEQ ID NO: 54500

SEQ ID NO: 71596 - DNA, 606 bp, Neisseria meningitidis; identical to SEQ ID NO: 69816

SEQ ID NO: 71597 - DNA, 1851 bp, Neisseria meningitidis
atgtacctaccctctatgaagcattccctgccgctgctggcggccctggtgcttgccgcgtgttcttcgacaaacacactgccagccggcaagaccccagcagacaatatagaaactgccgacctttcggcaagcgttcccacccgccctgccgaacccgaaagaaaaacgctggcagattacggcggctacccgtccgcactggatgcagtgaaacagaaaaacgatgccgccgtcgccgcctatttggaaaacgccggcgacagcgcgatggcggaaaatgtccgcaacgagtggctgaagtctttgggcgcacgcagacagtggacgctgtttgcacaggaatacgccaaactcgaaccggcagggcgcgcccaagaagtcgaatgctacgccgattcgagccgcaacgactatacgcgtgccgccgaactggttaaaaatacgggcaaactgccttcgggctgcaccaaactgttggaacaggcagccgcatccggcttgttggacggcaacgacgcctggaggcgcgtgcgcggactgctggccggccgccaaaccacagacgcacgcaaccttgccgccgcattgggcagcccgtttgacggcggtacacaaggttcgcgcgaatacgccctgttgaacgtcatcggcaaagaagcacgcaaatcgccgaatgccgccgccctgctgtccgaaatggaaagcggtttaagcctcgaacaacgcagtttcgcgtggggcgtattggggcattatcagtcgcaaaacctcaatgtgcctgccgccttggactattacggcaaagttgccgaccgccgccaactgaccgacgaccaaatcgagtggtacgcccgcgccgccttgcgcgcccgacgttgggacgagctggcttccgtaatctcgcatatgcccgaaaaactgcaaaaaagcccgacctggctctactggctggcacgcagtcgcgccgcaacgggcaacacgcaagaggcggaaaaactttacaaacaggcagcagcgacgggcaggaatttttatgcggtgctggcgggggaagagttggggcgcaaaatcgatacgcgcaacaatgtgcccgatgccggcaaaaacagcgtcctccgtatggcggaagacggcgcgattaagcgcgcgctggtgctgttccaaaacagccgaaccgccggcgatgcgaaaatgcgccgtcaggctcaggcggaatggcgttttgccacacgcggcttcgacgaagacaagctgctgaccgccgcgcaaaccgcgttcgaccacggtttttacgatatggcggtcaacagcgcggaacgcaccgaccgcaaactcaactacaccttgcgctatatttcgccgtttaaagacacggtaatccgccacgcgcaaaatgttaatgtcgatccggcttgggtttacggcctgattcgtcaggaaagccgcttcgttataggcgcgcaatcccgcgtaggcgcgcaagggctgatgcaggttatgcctgccaccgcgcgcgaaatcgccggcaaaatcggtatggatgccgcacaactttacaccgccgacggcaatatccgtatggggacgtggtatatggcagacaccaaacgccgcctgcaaaacaacgaagtcctcgccaccgcaggctataacgccggtccaggcagggcgcgccgatggcaggcggatatccccattgagggcgcggtatatgccgaaaccatcccgttttccgaaacgcgagactatgtcaaaaaagtgatgaccaatgccgcctactacgccgccctcttcggcgcgccgcacatcccgctcaaacagcgtatgggcaccgttcccgcccgctga

SEQ ID NO: 71598 - DNA, 681 bp, Neisseria meningitidis
gtgcaggcggatttagcctatgccgccgaacgcattacccacgattatccgaaaccaaccggtacagacaaagacaaaataagcacggtaagcgattatttcagaaacatccgtgcgcattccatccacccccgggtgtcggtcggctacgacttcggcgactggaggatagcggcagattatgccagttacagaaaatggaaagaaagtaatttttctactaaaaaagttactgaagagataaacgacaactaccaagaaaccaaaacagaacatcaaggaaacggcagcttccacgcctcttcttctctcggcttatccgccatttacgatttcaaactcaacgataaattcaaaccctatatcggtgcgcgcgtcgcctacggacacgttaaacatcaagttcattcggtggaaacaaaaaccacgactgttacctctaaaccaaagaacggctctccacagggaggagctgtcccatcaagagagcccagcaaacctccctatcacgaaagcaacagcatcagcagcttgggtcttggtgtcatcgccggtgtcggtttcgacatcacgcccaagctgaccttggacaccggataccgctaccacaactggggacgcttggaaaacacccgcttcaaaacccacgaagtctcattgggcatgcgctaccgcttctga

SEQ ID NO: 71599 - DNA, 447 bp, Neisseria meningitidis; identical to SEQ ID NO: 60428

SEQ ID NO: 71600 - DNA, 1272 bp, Neisseria meningitidis
atgttccaatggctttatgatgcattgtggctgcttgcgccgatatggatacggcgttatttggacaaacgctccggaagtgcccctgcatatcgggcgcatcgggacgagcgtttcggcaagccgtatccgaatcccgttaccggcgcggtttggatacacgccgtttcggtcggagaaacgcgtgccgcccagcccttgatacgcgagttgcggcagcgttttcccgatgcgccgctgctgatgacgcagatgaccccgacgggacgggaaaccgcgcaagttctgtttcccgatgcgcaatgccgctatcttccgtatgacaaaaaaacgtgggtacggcagtttttgcgcgaacaccgcccgatgttcggcattttgatggaaaccgaaatctggcccaatctgatgaaggaatgccggcgcgcgggtgtgccgctgtttttggcgaatgcgcggctgtcggaaaaatcgctgaacggttatctgaaagtccgccgcctgatccgtcctgccgccgcttcgctgacgggctgtctggcacagacggaggcggatgcggcgcggttggcgaaattgggcgcggcatccgtgcaggtgtgcggcaataccaaatacgacctgatgccgtcggaacagatgaaaacgctggcggggcagtttgaaaaacgcatcggaggccggccggttgccgtgtgcggcagcacgcgcgtttatcggggcgaagacgaggcggaaaaactgctggcggcgtggcaacaatatcgcggcgatgcgctgctggtcgtcgtgccgcgccatcccgagcattttcagacggtatttgaaacggcacaacgcttcgggtttaaggttcagcggcgcagcgacggtttgccggtcgaacctgatacgcaggtgtggataggcgacagtatgggcgagctgtatgcgtattacttgtgcgccgatgtcgcttttgtcggcggcagtctggtcgattcgggctgtcagaacatcatcgaaccgctttcctgcggcgttccgacgatattcggcttttcaacctacaatttttccgaagcctgccggcacgccttggcatcgggggcggcggttcgggttgagtcggcggacgcgtggcgggaagccgttgaaaaaaccttatcgtccgaggggggcggaatgcagatgcaggcgcgcgtggacggctttatcgcacaacatcgcggagcgggcgcgagaatcgccgaggcggtgcgggaagcggtatgcggacatcggggacgatag

SEQ ID NO: 71601 - DNA, 189 bp, Neisseria meningitidis; identical to SEQ ID NO: 59116

SEQ ID NO: 71602 - DNA, 933 bp, Neisseria meningitidis; identical to SEQ ID NO: 54672

SEQ ID NO: 71603 - DNA, 132 bp, Neisseria meningitidis; identical to SEQ ID NO: 39343

SEQ ID NO: 71604 - DNA, 966 bp, Neisseria meningitidis; identical to SEQ ID NO: 71326

SEQ ID NO: 71605 - DNA, 330 bp, Neisseria meningitidis; identical to SEQ ID NO: 46537

SEQ ID NO: 71606 - DNA, 567 bp, Neisseria meningitidis; identical to SEQ ID NO: 55861

SEQ ID NO: 71607 - DNA, 1176 bp, Neisseria meningitidis; identical to SEQ ID NO: 38512

SEQ ID NO: 71608 - DNA, 1887 bp, Neisseria meningitidis; identical to SEQ ID NO: 55957

SEQ ID NO: 71609 - DNA, 198 bp, Neisseria meningitidis; identical to SEQ ID NO: 36305

SEQ ID NO: 71610 - DNA, 519 bp, Neisseria meningitidis
  misc_feature 500, 501, 502, 503, 504: 'n' is a, c, g or t
atgacacaggccaaccgcgttatcattttcgacaccaccctgcgcgacggcgaacaatcgcccggcgccgctatgaccaaagaggaaaaaatccgcgtcgcccgccagctggaaaaattgggtgtggacatcatcgaagcgggttttgccgctgccagcccgggcgatttcgaggcggtcaatgcgattgcgaaaaccattaccaaatcaacggtctgttcattgtcccgcgccatcgagcgggacatccgtcaggcgggtgaggccgttgcgcccgcgccgaaaaaacgcatccacaccttcatcgccaccagccccatccatatggagtacaaattgaagatgaagccgaagcaggtgattgaggcggcggtcaaagcggtgaaaatcgctcgtgaatacaccgacgatgtggaattttcctgcgaagacgcgttgcgttcggaaatcgatttccttgccgaaatctgcggcgcggtgattgaagcgggcgcgaccannnnncacacacttaattaa

SEQ ID NO: 71611 - DNA, 231 bp, Neisseria meningitidis; identical to SEQ ID NO: 38834

SEQ ID NO: 71612 - DNA, 1005 bp, Neisseria meningitidis
atgaccatcattgtaacaggcgcggccggctttatcggcagcaacatcgtcaaagcacttaatcaacgcggtattaccgacatcgtcgccgtcgataatttgagcaaaggcgaaaaattcaaaaaccttgccgagtgtgaaatcgcccattatctcgataaacacgaattcatccgccaagtgagggaacacattttaccttatcaaaacatcgaagccgttttccatcaaggcgcgtgttccgatacgatgaaccacgacggtttgtatatgatggacaacaactaccagtacacgctggatttgctggactggtgtcaggacgaacgcatccctttcctttatgcctccagtgcggcggtttacggcaaaggcgaaatcttccgcgaagagcgcgaactcgaaaaaccgctcaacgtctacggctactccaaattcctgtttgaccaagtattgcgccgccgtatgaaagaaggcttgaccgcccaagtcgtcggcttccgctacttcaacgtttacggacaacacgaacaacacaaaggccgcatggcatccgtcaccttccaccatttccaccaataccgcgaacacggttacgtcaacctgttcggcagcaacgacggctacggcaacggcgaacaaacccgcgactttgtcagcgtcgaagacgttgccaaagtcaacctctacttcttcgaccatcccgaactttccggcatctacaacctcggcaccggccgcagccaacagtttaacgaactcgccgccgccaccgtcaacgcctgccgcgccgccgaaggcaaacccgaaatgagcttgaaagagctggtagaagaagaacttatccgctacatcccatttcccgatgcgctcaaaggcaaataccaaagcttcactcaagccgacatcaccaaattgcgtgaggcaggttatacggaagaatttttcgatgtcaaatcaggcgtcgagcgctacgtcaaatggatgctggaaaatttggcttaa

SEQ ID NO: 71613 - DNA, 789 bp, Neisseria meningitidis; identical to SEQ ID NO: 55468

SEQ ID NO: 71614 - DNA, 420 bp, Neisseria meningitidis; identical to SEQ ID NO: 54846

SEQ ID NO: 71615 - DNA, 1281 bp, Neisseria meningitidis
atgaaatccctttttattcggctgctcctgttgggttcggcggcaggcgttttctaccatacccaaaaccaatccctgcccgcgggcgaacttgtctatccgtccgcaccgcaaatcagggacggcggcgatgcgctgcactacctcaaccgcatccgagcccaaatcggtttgcacaagctggcacacgcgccggttttggaaaactccgcccgcaggcacgcaagctacctcacgctcaatcccgaagacggacacggcgaacaccatcccgacaatccgcactacaccgcacaaaagctgaccgaacgcacacgccttgccgggtatctctacaacggcgtgcatgaaaacatcagcacggaagaagaagccgccgaatcgtccgacagcgacatccgcacgcagcaacgccaagtggacggattaatgagcgcaatctaccaccgcctttccctacttgaccgccatacggatgaggcaggagcggcatttgtgcgcgaaaacggtaaaaccgttctcgtattcaatcagggcaacggcaggtttgagcggcattgcgcccaaggcagaaatcagccggaagcaggacggaaatattaccgcaacgcctgccataacggtgcggtcgtgtacaccgacgaagccatgcccgcacaggagctgctctatacagcctatcccgtcggcagcggcgcactgccttatttccacggcgagcgtccagaccccgtgccggaatatgaaatcacgggcaatcctgccagcattgatttttccgaggcggcaggcaaaattacgatgaaaagtttcaagctgtatcagggtaaaaacgaaatccgccccgtcagggttttaaccgccggcaacgaccccaacggcaggctgaccgcgtaccaattcgcgctttttccgctcaagcctttggaatacggcacgctttatacggcggtattcgactatgtccgcaacggacggcgagcgcaggcgaaatggcagtttagaacccgaaaacccgattacccttattttgaggtaaacggcggcgagacacttgcggttagaaaaggcgaaaaatatttcatccactggcgcggacgctggtgtttggaagcgtgtacccgttatacctaccggcagcgacccggcagccgcctgtccataggaaggcacgaggcgggcggcatcgtcttcagcgttgacggaatggcgggcagccgcatcacgcttgcaccggaaggagaaacggaacgaggcgtaaccctttatttacaggattga

SEQ ID NO: 71616 - DNA, 309 bp, Neisseria meningitidis; identical to SEQ ID NO: 55176

SEQ ID NO: 71617 - DNA, 1077 bp, Neisseria meningitidis; identical to SEQ ID NO: 39262

SEQ ID NO: 71618 - DNA, 999 bp, Neisseria meningitidis
atgtccgaaaacaaacaaaacgaagtcctgagcggttacgaacaactcaaacggcgcaaccgccgccgcctcgtaacggcaagttgcttggttgccgcctcctgcatcctgctggcagccgccctcagttccggccctgccgaacagactgccggcgaaacaagcggcgtagaaaacaaagcggcaggtgcggcacaaacccctgccttgaaatccgccgccgacaaaccgcaggacttggcaggcgaagacaagccttctgccgccgacagcgaaatcagcgagcctgaaaacgtaggcgcgccgctggtgctgattaacgagcgcctcgaagacagcaacatcaaaggtttggaagcatccgagaaactgcaacaggcagaaaccgccaaaaccgcaccgaagcaggcaaaacaacgcgctgccgaaaaagtgccggcaactgccgacagtacggatacggtagcggttgaaaaaccgaaacgcactgccgaaacaaaaccgcaaaaagcggaacgcactgccaaagccaagcccaaagccaaagaaaccaaaaccgccgaaaaagttgccgacaaaccgaaaactgccgccgaaaaaaccaaaccggatacggcaaaatccgacagcgcggtaaaagaagcgaaaaaagccgacaaggctgaaagcaaaaaaacagccgaaaaagaccgctcggacggcaaaaaacacgaaacggcacaaaaaaccgacaaagcggacaagaccaaaaccgccgagaaggaaaaatccggtaaaaaagccgccattcaggcaggttatgccgaaaaagaacgcgccttaagcctccagcgcaaaatgaaggcggcgggtatcgattcgaccatcaccgaaattatgaccgacaacggcaaagtttaccgcgtcaaatcaagcaactataaaaacgcaagggatgccgaacgcgatttgaacaaattgcgcgtacacggtatcgccggtcaggtaacgaatgaatag

SEQ ID NO: 71619 - DNA, 717 bp, Neisseria meningitidis; identical to SEQ ID NO: 54603

SEQ ID NO: 71620 - DNA, 618 bp, Neisseria meningitidis
atgaccttcccgcccctaaaatccccgctcaaattctacgccgtcgtccccaccgccgattgggtggggcgcatggtcaaagcaggtgccgacacggtgcaactgcgctgcaaggccctgcacggcgatgaattgaaacgcgaaatcgcccgctgcgccgcagcctgtcagggcagccgtacgcagcttttcatcaacgaccactggcgcgaagcaatcgaagcgggcgcgtacggcgtgcatctcggacaagaagacatggacaccgccgaccttgccgccatcgccgccgccggtttgcgcttgggtttgagtacgcactccgttgccgaactcgaccgcgccctgtccgtacaccctagctacatcgccagcggcgcgattttcccgaccacgaccaaacaaatgcccaccgccccgcaaggcttggacaaactgcgcgaatacgtcaaacaagcaggcggcacgcccgtcgtcgccattggcggcatcgatttgaacaatgctgaagaggtattggcaaccggcgtttcctcactcgccgtcgtccgcgccgtgaccgaagcggcaaatcccgaagcggtggttaaagcgtttcaggctttgtgggatggataa

SEQ ID NO: 71621 - DNA, 1056 bp, Neisseria meningitidis; identical to SEQ ID NO: 55011

SEQ ID NO: 71622 - DNA, 1599 bp, Neisseria meningitidis; identical to SEQ ID NO: 55629

SEQ ID NO: 71623 - DNA, 720 bp, Neisseria meningitidis
atgaaagacgatgttttgaaacagcaggcacacgcggcgatacagaagagactgggctacgcgttccgcgatatttcgcttttgcggcaggctttgacgcacaggagccatcatgcgaagcacaacgagcggttcgagtttgtcggtgattcgattttgaattatacggtggcgcggatgctgtttgacacgtttccgaagttgaccgagggcgagttgtcgcggttgcgggcaagtctggtcaatgagggcgtgctggcggaaatggcggcggaaatgaatgtcggcgacggtctgtacttgggggcgggcgagttgaagagcggcggcttcagacggccttcgatactggcggacgcgatggaggcgatgtttgcggcggtcagcttcgatgccgatttcaacacggcggaaaaggtggtgcgccatttgtttgccgaccgcgtccggtgtgccgatttccaaaatcaggcaaaagacggcaaaactgctttgcaggaggcgttgcaggcacgccgctttgctttgccgaaataccgtatcgaagagcaaatcggccatgccaacgacagtatgtttgtggtttcctgcgatttgggcgaactgggtttcgtgtgccgtgccaaagggacgagccgcaaggcggcggagcaggaagcggcgaaagaggctttgaaatggctggaagagaagctgccgctgaagaagaaaaagaaatga

SEQ ID NO: 71624 - DNA, 1152 bp, Neisseria meningitidis
atgagtagtagagaccaactttttaaagccccgccgtttgaaaaccacagcccgctgacctggtatcaggctgcctcacaactgcccaacttcatccgcgacgacgcgcagacagccgccatcgaacacctcgatcggctttggaccgaattgatgatgttcaaacgcaaaagaaaccgttttttaggcaggagtttgcgctccccgcaagtccccaaagggctttatttctatggcggggtcggacgcggcaaaagctttctgatggacgcttttttcggctgcctcccttaccgccgcaaacgccgcgtccactttcatgcctttatggcagaaatccaccagaggctgaaaaccctgaaaagcgaaagcaacccgttgaaatccgttgccgccgagattgccaaagaaacccgcgtattatgttttgacgaatttcatgtcagcgatattgcggatgcaatgattttaggccgtctgctggaaaacctgcttaacgagggcgttgttttggtggcgacttcaaactacgcgccttccgaactctacccgcaaggtcaaaaccggagcagttttcttcccacaatcgcgctcatcgagtccagcctgaccgtcttaaacgttgacggcggtgaagactaccgactgcgtaccctccgccccgccgagattttctttacgcctgccaatgaagaaaatgaggcaaaactggcaaaactgttcaaagaaatgacaggcattaccgatttgaaccccggcatcagcaccatccacggtcgggagattccccacaaagccgagtccggccgtgccatatggtttgatttccgcgcactgtgcttcggcccccgctcacagtccgactacctgtatttggccgaacattatgaaatggtttttatttcaggtttggaacaactctcaccgcaagaaaaggcggaggcacggcggctgacttggctgattgacgtactctacgatttccgtgtcaaactgtgtgccaccggcgcggtagatgtcaaccatatctatacagaaggcgattttgccgaagaatttacccgcaccgccagccggatggtcgaaatgcagtccgaagtttatttggaacagccgcacctgaccctatctcccaaggcttcaggcggataa

SEQ ID NO: 71625 - DNA, 1275 bp, Neisseria meningitidis
atgccgtctgaaacctcttccccacgcaaagaaaacgaaacagaagtacacattcctgccgctccttttatcgtcaaacagtccggcagcaacgctttggcagtctgcgccctggtattggcggcattgggtttgggtacaagtggttttttgtttgtccaaggacagaatgtcttgaaaaaccaagagttggcattcaaccaaaaaatcgacaaagccgctttgggcgagtcggaaaacgccgccctgctcaaagacaacctcaaccgccaaagtgccatacagtccgaactcgaccgtttggacagcggtgtcaaagccaacggcgaacagattctgatgacgcaaaaagcctatcgcgagctgaccaaagggcgtgccgattggctggtggacgaaaccgagaccatactcaatctggcggcgcaacagctggtgttgaccggcaatatccaaacggcagtcggcgtgttggagcatatcgacagccgcctgtcccgtttcaatcaggcagagcttctgccgatcaaacaggcagtcagcagcgacttggcggaactgaaaaaccgtccctatgtcgatatttccggcacggcattgcgcctcgacaggctggaaaccgccgtatccggactgccgctgattttggacggcgtattgaaaccgggcgtacaggcacgcaacgaagccgtttccgcttcatggtggcagaacgtatgggaaaaatccctcggcacattgaaggggctggtcgaaatccgccgtttggaaaacaacgatgccatgctgctttcaccggaacaggcatattttgtgcgtgaaaacctgcgcctccgccttttggatgcgcgcattgcattaatgcagcgcaacggcgaagtctatcagggcgatttgaacaatgccgaagccgccgtcagacagtatttcgatgccaagtctcccgccacgcagtcgtggctgaaagaactggcggaattgaaggcgttggatgtgcgcatgacggcggatgacggtttgaaaaacagcctaaatgccgtccgcgcctatcgcgacggtacgcgcatgacggcggcggaaaatcaagaagcggaacaggcggcttccgaaccggcaaacgaaaacacagcttccgaaccggctgccgcatcggatgtgaagaccatagaagcaccgtccctgccttcggaacgcaaaccggaacagcctgcaaaaaaacagtccgtgccggaaaaggcagggcgttcgccgtccgctaaaggagaacgcgcatga

SEQ ID NO: 71626 - DNA, 195 bp, Neisseria meningitidis; identical to SEQ ID NO: 38181

SEQ ID NO: 71627 - DNA, 210 bp, Neisseria meningitidis; identical to SEQ ID NO: 55789

SEQ ID NO: 71628 - DNA, 1053 bp, Neisseria meningitidis
atgaccgtatcccccgtcgccttgcgccgtaagaccgagtgcaagcctcatcccaccgcgcgctattggaaaaaatgcgatgtcgaagccctgttcggacttcccttcctcgacctcatttaccaagccgccgaaatccaccgccaaaatttcaacccgcgcgaaatccagctttccacgctgttgtccatcaaaaccggcggttgtcccgaagattgcgcctactgtccgcaatcggcgcaccacaacaccaatctgggcaaagagcagatgatggatgtggatgaaatcgtcgaaaaagccaaaatcgccaaatcgcgcggcgcaagccggttttgtatgggcgcggcatggcgcggccccaaacccaaagacgtggagacggtttccgcaatcatcaaagccgtcaagggcttgggtatggaaacctgtggcacgttcggtatgctcgaagaaggtatggcggaagacttgaaagaggcgggcttggattattacaaccacaacctcgacaccgaccccgaccgctacaacgacatcatccatacacgccggcatgaagaccgtatggacaccttgggcaaagtccgcaacgccggtttgaaagtctgctgcggcggcatcgtcgggatgaacgaaactcgtgccgaacgcgccgggctgattgccagcctcgccaacctcgacccgcagcccgaaagcgtgccgattaaccggttggtcaaagtggaaggtacgccgcttgccgatgccgaggatttggactggacggaatttgtccgcaccatcgccgtggcgcggattacgatgccgcaaagttatgtccgactgtcggcagggcgcagcaatatgccggaagcgatgcaggcgatgtgctttatggcgggcgcgaactcgattttttacggcgacaagctgctgaccacgggcaatccggatgaagacggcgacagaatcctgatggaaaagctcaacctgtatcccttacagtttgagctggaaggcgaggtcgccgaagtggaaaaagcctctgggattaaagtggattattga

SEQ ID NO: 71629 - DNA, 396 bp, Neisseria meningitidis
gtgaaactgctggcgaataactggcagccgattgccatcatcgcgcttgtcggcacgggtttggcggtgtcacaccatcaaggctacaagtcggcttttgcgaagcagcaggcggtcattgacaagatggaaaaagacaaagcgcaagccctgctgttgtcggctcaaaactacgcccgcgagctggaacaggcacgcgcggaagcgaaaaaatatgaagtcaaggcgcactctgtcggcatggctttggcgaaaaaacaggcggaagtcagccgtctgaaaacggaaagagacctttgcaaaattcctttccctcccgacagccgaaacccaaacacaggttttcagctgttttcgccccaaatacctcctaattttacccaaatacccccttaa

SEQ ID NO: 71630 - DNA, 489 bp, Neisseria meningitidis; identical to SEQ ID NO: 44020

SEQ ID NO: 71631 - DNA, 858 bp, Neisseria meningitidis; identical to SEQ ID NO: 54973

SEQ ID NO: 71632 - DNA, 1527 bp, Neisseria meningitidis
atgaacacgccccttccttattccaattacctcatccgcatcctgacggcatctgtctatgatgtggcggtcgaaacgcctttggaaccggcacgcagcctttctgtacgtttgaaaaacaacatccttttgaaacgcgaagatttgcagccggttttttcgttcaaaatacgcggcgcgtacaacaaaatgtccaagttgccgaaagatgcgctcgcttgcggcgtgattgcggcaagcgcgggcaatcacgcacaaggcgtggcattgtccgcacagcgtttgggttgccgtgccgttatcgtcatgccggagactacgccgaaaatcaaagtggatgcggtcaaaagccgtggcggcgaggtggttttgcgcggtgtttcatacaacgatgcttacgattatgcgatggagctggcggaacaggaagggctgacctatatcgcaccgtttgacgatcctgatgtgattgcaggacaagggacggtagggatggaaattgtcagccagcatcccgatccaatccgcgccgtattcgtaccgataggcggtggcggtttggcggcgggcgtggcggcatttatcaagcaggtccgtcccgaaatcaaagttatcggcgttcagaccaacgattcctgctgtatgaagcagtcggtcgaagcgggtgaaatcgtccatttgaaagatgtcgggctgttttcagacggcacggcggtcaaagtcgtcggaaacgaaaccttccgtctctgcaaagaacttttggatgaaatcattacagtcgataccgatgcggtttgcggcgcggtcaaggatattttcgatgacacgcgcagcattaccgagccggcgggtgcattggcattggcaggtctgaaagcctatatcgcccgagaaggcgcggaaaaccaaaccctgattgccgttaccagcggtgcgaatatgaattttcaccgtttgcgccacgtttcggaacggagcgaattgggcgagggcaacgaaggtatttttgccgttaccatccccgaagagcgcggcagcttccttaagtttgtcaatatattgggaaataggaatattaccgagttcaactaccgctacggggacgatgaaaaagcgcatatctttgtcggacttcaagcggcaggcccgcaggatttggcggttatcggcagccggttggatgaggcgggattgcccaatgtcgacctgaccgatgatgagattgccaaaatccatatccgctatatggtcggagggcggacggacaaagtagaaaacgagcgtctggtcagttttgagtttccggagcgtccgggggcgttggcgcgttttttgaaccatatgcagggcggttggaacattacgctcttccattaccgcaaccacggtgcggattacgggcggattttggtcggtatcgatgtgccgccgcacgatgccgccgcatttgacggtttcttggaaagtctgggatacagctatcacgaggaaacgcaaaatgccgcgtacaagctgtttcttgcctga

SEQ ID NO: 71633 - DNA, 441 bp, Neisseria meningitidis
atgaatttttggcatatgcagatgcatccaaccgatgaaatggagttctctgagaacattgattggattttggaacacaaaaaaattatcggtttgggacaatgggaaggtggaaaaggtcaaattgccgcatttatcaatgaaatgcaggttaatgacattgttgcgctaaaacgcggtcaagaattgattgcgcttgtccaaattaccggtggggcatataaagttaccgatgatgccaatctggaaactgcatggattgttaaccgtcgtcctgttcgcgtattagattgggcgattgaaccgaaaatattaaaacaagctcgtggtacattaaatcgttgcgtacgtgatgatgtggaaactactcaaaccattaaacaatggtatgaagccgtagtgaaatcatttacaaaacgaagagtggatttaaccgtttaa

SEQ ID NO: 71634 - DNA, 474 bp, Neisseria meningitidis; identical to SEQ ID NO: 54433

SEQ ID NO: 71635 - DNA, 834 bp, Neisseria meningitidis; identical to SEQ ID NO: 54769

SEQ ID NO: 71636 - DNA, 423 bp, Neisseria meningitidis
atgagcatcatgcaagttgaggtggtcagtagcgagcaaaacatctattcgggcgaagccagctttgtagtggttccgaccgttcaaggtgagcttggtatttacccgcgacacgagccgattatgagtttggtgcggccgggggctttgcgtttgaccgttccgggcgaggataaagaggttttggttgctgtttccggcggtgttttggaagtacagcctgataaagtaactatcttggcggatgttgccgtccgcagtgcggagatggatcaggcacgtgcggaagaggcgaaaaaagccgcagaagcgggcatttcccaagctaaagacgataaggctttggcggaggcgcataaagcattggctgctgcgattgcacagctcaaaactttggactatatccgttcgcacaagaaataa

SEQ ID NO: 71637 - DNA, 1197 bp, Neisseria meningitidis; identical to SEQ ID NO: 61809

SEQ ID NO: 71638 - DNA, 828 bp, Neisseria meningitidis
atgcaaaaccacgttatcagcttagcttccgccgcagaacgcagggcgcacattgccgcaaccttcggcgcgcgcggcatcccgtttcagtttttcgacgcactgatgccgtctgaaaggctggaacaggcaatggtggaactcgtccccggcttgtcggcgcacccctatttgagcggagtggaaaaagcctgctttatgagccacgccgtattgtggaaacaggcattggacgaaggtctgccgtatatcgccgtatttgaggacgacgttttactcggcgaaggcgcggagaaattccttgccgaagacgcttggctaaaagaacgctttgaccccgattccgcctttatcgtccgcttggaaacgatgtttatgcacgtcctgacctcgccctccggtgtggcggactactgcgggcgtgcctttccgctgttggaaagcgaacactgggggacggcgggctatatcatttccaaaaaagcgatacggtttttcctgcaacatttcgtaatgttgcagccggaacagataaaacctatcgacttaatgatgttcagtgattttttcgataaggaggggatgcctgtttatcaggtcagtccggccttatgcgcccaagagctgcattatgccaagtttcacgaccaaaacagcgcattgggcagcctgatcgaacacgaccgcctcctgaaccgcaaacagcaaaggcgcgattcccccgccaacacattcaaacgccgcctgatccgcgccttgaccaaaatcagcagggaaagggaaaaacgccggcaaaggcgcgaacagttcattgtgcctttccaataa

SEQ ID NO: 71639 - DNA, 948 bp, Neisseria meningitidis; identical to SEQ ID NO: 54669

SEQ ID NO: 71640 - DNA, 3204 bp, Neisseria meningitidis
atggctaaattttttatcgaccgccctatttttgcgtgggttatttcgattttcattattgcggcgggtattttcggcatcaaaagcctgcctgtttcgcaatatccgtctgtcgccgccccgaccattactttgcacgccacttatccgggtgcgtccgcgcaggtaatggaagacagcgtgctttccgtgatcgagcggaatatgaacggcgtggaaggtttggattatatgtccacttccgccgattcgagcggcagcggcagcgtgagcctgacctttacgcccgataccgacgagaatctggcgcaggtggaagtgcagaacaagctttccgaagtattgagcacgctgccggcaaccgtccagcaatacggcgtaaccgtatccaaggcgcgttccaatttcctgatgattgtgatgctttcgtcggatgtgcagtcaaccgaagagatgaacgactacgcgcagcgtaatatcgttcccgagttgcagcgtatcgaaggcgtggggcaggtacgcctgttcggcgcgcaacgcgcgatgcggatttgggttgatcctaagaaactgcaaaactacaatttgtcgtttgccgatatcggcagcgcgctgtccgcccagaacgtccagatttcagcgggttctatcggttcgcttcccgccgttcgcggacagacggttacggctaccgtaacggcgcaagggcagttgggtacggcagaagaattcggcaacgtcatcctccgcgccaataccgacggttctaatgtttacctgaaggatgtggcaagggtcggactgggtatggaagactattcttcctcaacccgtctgaacggtgtaaataccaccggtatggcggtgatgctgtccaacagcggcaatgcgatggcgacggcaaaggcggttaaagaacgcatggcgacgttggaaaaatactttcctcagggtatgagctggaaaaccccttacgatacttccaaattcgtcgaaatttcgattgaaaaagtgattcatactttaatcgaagcgatggtgctggtgtttgtcgtaatgtatctcttcctgcaaaacatccgttatacgctgattccgaccatcgtcgtaccgatttcgctgttgggcggtttcgctttcatctcttatatgggcatgtcgattaacgtactgaccatgtttgcgatggttttggtcatcggcatcgtggtcgatgacgcgattgtggtggttgaaaacgtcgagcgcattatggcgggtgaaggcttgccgcccaaagaagcgaccaaaaaagcgatgggtcagatttcgggcgcggtcatcggtattaccgccgttctgatttccgtgttcgtaccgttggcgatgttcagcggggcgacgggcaatatttacaaacagtttgccctgacgatggcgtcatcaatcgcattctccgccttccttgcgctgacccttacccctgctttgtgtgccacaatgttgaagacaatcccgaaagggcatcacgaagagaaaaaaggtttcttcggctggtttaacaagaaattcaacagttggacgcacggttacgaaggccgggttgccaaagtgctgcgtaagactttccgcatgatggttgtctatatcggcttggcggttgtgggcgtgttcctgtttatgcgcctgccgacttcgttcctgccgaccgaagaccaaggcttcgtcatggtcagcgtgcaactgcctgcaggagcgacccaagagcgcaccaatgcgactttggcgcaagttacccaactggcgaaaagcattcctgaaatagaaaacatcattaccgtttccggcttcagcttttcgggcagcggtcagaatatggcgatgggttttgccatattgaaagattggaacgagcgtaccgcgcccggcagcgatgccgttgcgattgccggcaagctgacgggtatgatgatggggacgcttaaagacggttttggcatcgccgtcgtcccgcctccgattctggagttgggcaacggttcgggtctgagcatcaacctgcaagaccgcaacaataccggccataccgcattgctggcgaagcgcaacgagttgattcagaaaatgcgtgccagcggtttgtttgaccccagcaccgtccgtgccggcggtttggaagactcgccgcagttgaaaatcgacatcaaccgtgccgccgcggcggcgcaaggcatttcgtttgccgacatccgcaccgcattggcaagtgcgctgagttcgtcttatgtcagcgacttcccgaaccaaggccgtctgcaacgcgtgatggtgcaggccgacgaggatgcccgtatgcagcctgccgatattttgaacctgaccgtgccgaacaaatccggcgtcgccgtaccgctttccaccattgctactgtttcttgggaaaacggtacggaacagagcgtacgcttcaacggttatccttcgatgaagctgtccgcttcgcctgcaaccggcgtttccaccgggcaggctatggcggcggttcaaaaaatggttgacgaattgggcggcggttacagcctggagtggggcggacagtcgcgcgaagaggcaaaaggcggctcgcaaaccctgattttgtacggtttggcggttgcagccgtatttttggtacttgccgcgctttatgaaagctggtcgattccgctggcggtcatccttgtgattccgttgggtttgatcggtgcggctgcgggcgtaaccgggcgcaacctgtttgaaggactgttgggcagcgttccctcgttcgccaacgacatctactttcaagtcggtttcgttaccgtgatgggtttgagtgcgaaaaacgcgattttgattatcgagtttgccaaagaccttcaagcgcaagggaaaagcgcggttgaagccgctttggaagcagcccgcctgcgtttccgtccgattatcatgacctcgtttgcctttattttgggcgtggttcccctgtatattgccggcggtgcaagttctgccagccagcgcgccattggtacaaccgtattctgggggatgctcatcggcacgctcttgtcggtgttccttgttccgcttttctatgtggtggtgcgcaaattcttcaaagaaaccgcgcacgaacacgaaatggcagtaaaacacgctgccgaagcgggcatcaccggttcggacgacagccaacattaa

SEQ ID NO: 71641 - DNA, 474 bp, Neisseria meningitidis; identical to SEQ ID NO: 44983

SEQ ID NO: 71642 - DNA, 891 bp, Neisseria meningitidis; identical to SEQ ID NO: 55557

SEQ ID NO: 71643 - DNA, 216 bp, Neisseria meningitidis
  misc_feature 201, 202, 203, 204, 205: 'n' is a, c, g or t
atggaacagcagcaaagatacatcagcgtactggatatcggtacgtctaaagtcctcgcactgatcggggaagttcaagatgacgacaaaatcaacatcgtcggtttggggcaggctccttcacggggcttgcgcgcgggcatggtaaccaatatcgatgccaccgtccaagccatcaggcaggcggtcaatgatgccgannnnncacacacttaa

SEQ ID NO: 71644 - DNA, 2058 bp, Neisseria meningitidis
atgacacgcaaaatcttagttacctccgccctgccctatgccaacggcagcatccacctcggccacatggtcgaacacatccaaaccgacgtttgggtgcgcttccaaaaactgcgcggcaacgaatgctactactgctgcgccgacgacacccacggcacgcccgtgatgcttgccgcgcaaaaacaaggcatcgcgcccgaagacatgattgccaaagtgcgcgaagaacacctcgccgactttaccggtttcaacatcggctacgacaattattacagcacccattcccctgaaaacaaacagttttcccaagatatttaccgcgcgttgaaagccaacggcaagattgagagccgcgtcatcgagcagcttttcgaccccgaaaaacaaatgttcctgcccgaccgcttcgttaaaggcgaatgcccgaaatgccacgcccaagaccaatacggcgacaactgcgaagtctgcggcacgacctattccccgaccgaactgattaacccgtattccgccgtttccggcgcgaaacccgaattgcgcgaatccgaacacttcttcttcaaactgggcgaatgcgccgacttcctcaaagcatggacttccggcaacaacccgcacgacggcaaaccccatctgcaaccagaagccctcaacaaaatgaaagaatggctgggcgaaggcgaagaaaccaccctgtccgactgggacatttcccgcgacgcgccgtatttcggttttgaaatccccgacgcgccgggcaaatacttctacgtctggctggacgcgcccgtcggctacatggcatcgtttaaaaacctgtgcgaccgcatcggcatcgatttcgacgaatacttcaaagccggcagccaaaccgagatgtaccacttcatcggcaaagacatcctctatttccacgccctgttctggcccgccatgctgcatttctccggccaccgcgccccgaccggcgtgtacgcacacggctttttgaccgtggacggacaaaaaatgtccaaatcgcgcggcacgtttattaccgccaaatcctatctggaacaaggcctaaaccccgagtggatgcgctactacatcgccgccaaactcaacagcaaaatcgaagacatcgatttgaacctgcaagactttatctcgcgcgtcaacagcgacctcgtcggcaaatacgtcaacatcgccgcccgcgcgtcaggtttcatcgccaaacgctttgaaggaaaactcaaagacgtttccgacagcgcattgctggcaaaactgactgcgcaaagcgaagccattgccgaatgctacgaaaaccgcgaatacgcccgcgccctgcgcgacatcatggcattggcagacattgttaatgaatacgttgatgccaacaaaccttgggaactcgccaaacaagaaggccaagacgaacgcctgcacgaagtatgcagcgaactcatcaacgcctttacgatgctgaccgcctacctcgcccccgtattgccgcaaaccgccaccaatgccgcgcgtttcctcaatctggacgcgattacttggacgaacacaagggtaaccttgggcaaacacgccatcaacaaatacaaacatttaatgcaacgagtggagcaaaaacaagtggacgatttaatcgaagccaacaaacaaagcatcgccgccgcagccgcacctgccgccgaagagagcaaatacgaaaaagtcgccgaacaggccagcttcgacgactttatgaaaattgatatgcgcgtcgccaaagtcttgaactgcgaagccgtcgagggcagcaccaaacttttgaaattcgacctcgatttcggttttgaaaaacgcatcatcttctccggtatcgccgcgtcttatcccaaccctgccgagttaaacggaagaatggtcatcgccgtcgccaacttcgccccgcgcaaaatggcaaaattcggcgtatccgaaggtatgattttgagtgccgccacggcagagggcaaactgaagctcttggatgtggatgcaggcgcacaaccgggcgacaaagtcggttaa

SEQ ID NO: 71645 - DNA, 1344 bp, Neisseria meningitidis; identical to SEQ ID NO: 54257

SEQ ID NO: 71646 - DNA, 360 bp, Neisseria meningitidis; identical to SEQ ID NO: 42625

SEQ ID NO: 71647 - DNA, 1545 bp, Neisseria meningitidis
atgtgcggcgtattaggtttggtcagtcatgaacccgtgaaccagtttctgtacgacggtttgcagatgttgcagcacagggggcaggatgcggcgggcattgcaacggcggaaggcggcaccttccatatgcacaaaggcaaagggatggtgcgcgaagtgttccgcacacgcaatatgcgcgatttgaccggcaacgccggtatcgcccacgtccgttatcctactgcgggcaacgcaggcagcagcgcggaggcgcagcctttctacgtcagctcgccgttcggcatcgttttggcgcacaacggcaacctcaccaacactgccgaactgtatgaaaacgtgtgtaacaaacacctgcgccacgtcaacaccagctccgattccgaagtcttgctcaacgtattcgcgcacgaattacgccgcgaagtctctaaaaacgccgacccgcaccggctcaatgccgacaatattttcaacgccgttgcccaagtccaccgcctggtgcgcggcgcatacggtgtgattgccatgattgcgggctacggtatgctcgccttccgcgacccttacggcatccgcccgctggtattgggttcgcaaaccgacaacgaaggcaggaaatcctatgccgtcgcctccgaatccgtcgccttcaacgcgcttgcctacgatttggaacgcgacatccggccgggcgaagcggtatttgtcggctttgacggcacaatgattgcccgccaatgcagcgaccgtgccaaactcagcccctgcctttttgaatatgtttattttgcccgccccgactccgtaatcgacggcgtatccgtttaccaatcgcgcttggatatgggcgtgtcgctggcggaaaaaatcaaacgcgagctgcccgtggacgacatcgatgtcgtgatgcccattcccgacaccagccgccccagcgcgatggagcttgccgtccacctcgacaaaccctaccgcgagggcttgattaaaaaccgctatatcggccgcacctttatcatgcccggtcaggcgacgcgcaaaaaatccgtgcgccaaaaactcagcccgatggaaaccgaatttgcaggcaaaagcgtgttgctggtggacgactccatcgtgcgcgggacgaccagccgcgaaatcgtcgaaatggtacgcgcggcgggcgcgcgcaaagtctatatcgcctccgccgcgcccgaagtgcgctatcccaatgtgtacggcattgatatgcccacgcgcgaagagttgattgccaacgggcgcagcgcggcggaaatcgccgccgaaatcggcgcggacggcatcgtatttcaagacttgggcgatttggaagccgtcgtcaaagcactcaatccgaaaatcgaatccttcgattcgtcctgtttcaacggcatttatcagaccggcgacatcgatgatgcctacctcgaccgcctgtctgccgagaaatccggctgcggcggtctgaaaatccacccgagcaggatggaacacagcatcagcatcagcgatgcgggcgacgaagaataa

SEQ ID NO: 71648 - DNA, 1542 bp, Neisseria meningitidis
atgaagtttttagaccgtgaggcaagcattgccaagccgggtttcaaccgttggctcgtaccgcccgcagcattggcggtacaccttgccatcgggcagatttacgcctattccgtattcaacgcgccgctgaccaaacttatcggcataaccgaatcggcggccggagattggaagctgacgaccgtaggttggattttcagtatcgcactcgcgatgctgggcgcgtcggccgccctgttcggcacatggatggaacgggtagggccgcgcaaagccatatttgccgccgcctgctgtttcagcctgggcttcttcgtatccgcattcggcgtgagtacgcacaacctcttcctgctttatttgggcaacggcgtcatcggtggcgtaggcttaggcttaggctacatcgggccggtttccacactgatgaaatggtttcccgacaagccgggtatggcgaccggtttggcgattatgggtttcggcggcggcgcaatgctggcctctccgctttccgtatcactgatgaacgccttttcaaacgccgcttcagtcggggttgttgaaaccttcgccgtattgggcctgctttacctcgcactgatgatgttcggcgcgtttaccatccgcgtacctgccgacggctggaaacctgaaggctataccgcgccgaaaacgcaaaacaagctggtcagcagcaatcatgtcaacgtgtcacaagccatgaaaacgccgcaattttggctgttgttctgggtattgtgcctgaacgtaaccgccggcattggcgtattgggtcaggcatccgtgatgattcaggaactcttttccgaaacctccgtaggcaggcaggcgtcagtcggcgcaggtgcggcggcaggcttcgtcagcctcctgagcctgtttaacatgggcggacgctttttatggtcgagcgtttccgacaaaatcggacgcaaaaacacctacaccattttcttcgtactcggttcgctgctgtatttcgccgttccctccatcggcgagggcggcagcaaagccctgttcatcatcggcttttgcgtgattatttccatgtacggcggcggatttgccgccattcccgcctacctgaaagacctgttcggcacctatcaggtcggcgcgattcacgggcgcatcctgctggcctggtcaaccgccgccgtcatcggcccggtactggtcaattacatacgccaaagccaaatcgacagcggcataccggcggcacaggcatacagcgtaaccatgtacatcatggcgtgcctgctgattatcggtttgttgtgcaacctcgccgtcaaatccgtacacgaaaaacaccacgaaaaagacatcaaaaccgccgcacacagcggcaaccccgatgacgaaaccgccatatccgacgcttaccttgtgggcgaaaaagtttccggcggcggcatatcggtctggtggcgttgggcattggccgtcataccgctcgcctacggcgtggtgatggtctttgtcaaagcactcgaccttttctcctga

SEQ ID NO: 71649 - DNA, 1185 bp, Neisseria meningitidis
atgaccgaaccgacctcccgccgccgttttctgaaaacctgcaccgccgctgccggcgcggggctgcttcaggcttgcggcacatccgccacatccgttccgccccttccctcttcccattccgttgtgaaagcccgaaccgtgcctctccaaacgccacgccgtcaaagttcggacggcaaccttctgcgcgttgtcgcttcgtcaggctttgccgaagacaccaaccgcgtcaacacagccttaacccgcctttacaatgtcggttttaccgtaaccaaccaacaggcgggcagccgccgtttccaacggtttgccggcacggacacgcaacgtgccgccgatttccaagaggtcgcttccggccgcgtcgccacgcctaaagtgctgatgggcttgcgcggcggttacggtgcggcgcggattctgccgcatatcgattttgcttcgctcggcgcaaggatgcgcgaacacggcacgctctttttcggattcagcgacgtatgcgccgtccagctggcattgttggcaaaaggcaatatgatgagttttgccggcccgatggcttatagcgattttggcaaacccgcccccggtgcgtttacgatggatgcctttatcaagggtgcaacccaaaaccgcctgaccgttgatgttccttatatccaacgcgccgatgtcgaaaccgaaggcatattgtggggcggcaacttaagcgtcctcgcctcgctcgccggcacgccttatatgcccgacatcgacggcggcattttgttcctcgaagatgtcggcgaacagccctaccgcatcgaacgtatgctcaatacgctgtatctttcgggtattttgaagaaacagcgcgccatcgtgttcggcaatttccgtatggaaaaaattcgagatgtctatgatccgtcttatgatttttctgccgttgccaaccatgtttcgcgcacggcgaaaatccccgtgctgacgggcttcccgttcggacacattgccgacaaaatcactttccctctaggcgcgcacgcccgaatccgtatgaacggaaacagcggttattcggtcgcgtttgaaggctacccgacactcgatgcgtccgccctgactttggataccctgctcccaccgccggatttgcccatcttccccgaaagcggtgttgccgatatttcggaataa

SEQ ID NO: 71650 - DNA, 1200 bp, Neisseria meningitidis; identical to SEQ ID NO: 54632

SEQ ID NO: 71651 - DNA, 864 bp, Neisseria meningitidis; identical to SEQ ID NO: 44990

SEQ ID NO: 71652 - DNA, 1539 bp, Neisseria meningitidis
atgtggaaaattctgcaggcgtgcgtcgaagcagacgtgattgtgattacgcaggcggcgaataccggactgaccagcggttcgacccccgacggcaacgattacgaccgcgacatcgtgattgtgaacaccatgcggatgaacatcatccaaaccatcaacaacaacgaacaagtcgtctgcctgcccggctcgaccctgaaccagcttgaattgctgctgaaacccttgggacgcgaaccgcattcggttatcggctcttcctgcatcggtgcgtccgtcttgggcggcgtgtgcaacaactccggcggcgcattggtacagcgcggcccggcctacaccgaaatggcactgttcgcccaaatcaacgaagaaggcaggttggaactggtcaaccacttgggcatagacttgggcgacacgcccgaagaaatcctgaccaacctgcaaggtcatcattatcaaaacaaagacatcaaacaagacgcgggcaaaggacacgaccacgcctattgcgaacacgtccgccaagtggacgaaccgaccgccgcgcgtttcaatgccgaccccgcccgccattacgaagcctcgggctgcgcgggcaaactgatggtttttgccgtccgtttggacaccttcccgcaagaaaaacaaaccgccgtgttctacatcggcacgaacgacatcaacgagctgaccgacatccgccgcgccgccttgggcgaatttgaaagcctgcccgtttccggcgaatacatccaccgccacgctttcgatattgccgacgtgtacggcaaagacacgttttacgtcatcaaaaaattcggtacgcaccaactgccgaaattatttgacttgaaggcgcgcgtggacaggttcggcaaaaaagccagcttcctgcccaaacatttttccgacaaggccatgcagttcgtcagcaaatacctgcccgaccacctgcccaaatccatgcgcgattaccgcgacaaatacgaacaccacctgattctgaaaatgggcgggaaaggcgtggatgaggcgcgcgcgttcttaaaagaatattttgcacaccacagcggcgcgtttttcgagtgcaacgccgaagaaacccaagccgcgatgctgcaccgtttcgccgtcgcctccgccgccatccgctaccgcgccgtgcatgatgacgaagtggaagacttggtcgcgcttgacatcgccctgcgccgcgacgaccgcgactggtttgaaaaactgccgcccgaaatcgacaataaaatcatccacaaactctactacggacatttcatgtgccacgttttccatcaggattacatcatcaaaaaaggcaacgactgcatggcgttggaacacgaaatgctgcatcttttagaccaacgcggcgcgcaatatcccgccgaacacaacgtcggtcatttgtatgaagccaaacccgcgctcaaacagttttaccgcaaacttgacccgaccaacagcttcaacccgggcgtaggcaaaaccagcaaaaagaaaaactgggcggaataa

SEQ ID NO: 71653 - DNA, 1866 bp, Neisseria meningitidis; identical to SEQ ID NO: 61595

SEQ ID NO: 71654 - DNA, 534 bp, Neisseria meningitidis
atggcagagttcgcaacgattgccagaccttatgcaaaggcattgttcggtctggctcaggaaaaaaaccaaattgagtcttggttgggcggactggaaaaacttgcggcggttgttcaggaagggaaggtggcttcattgattgaccgtcctgaaacgaatgcttcagaaaaagcagatatcctcatcgatttggtcggtttgaaagacaaggagttgaaaaactttgttattgtcttggccgggcagaaacgtttgtcgatattgccggaagtatatgctcaatatcaagacttgaccttatcattcaaccatatcaaatctgccgtcatttacagtgcctatccgttgaccgacaaacaggtcggcgagttggcgcaaatgctgaataagcgtttcgacagcgagctgaaaatctctgtcgaaatcgaaccggagctgattggcggcataaaagttgaagtgggtgatcaggttttggatttgtctgtacaaggcaaattgagtgccttgtacacgactatgacgaattag

SEQ ID NO: 71655 - DNA, 582 bp, Neisseria meningitidis
atggataatcaagaaatcaacaacggccgccgccgtttcctgacactcgcgacctgcggcgcgggcggagtggcagcattgggtgtggcaacgccgtttgtggccagttttttcccttcggaaaaagccaaggccgccggtgctgccgtcgaggtggatgtcagtaaaatcgaagcgggtcagctgctgaccgccgagtggcaaggcaaaccgatttgggtgctcaaccgtacagatcagcagcttaaagacctgaaaggcctgaacggcgaacttaccgatcccaattccgatgcggaacagcagccggagtatgcgaaaaacgagacccgttcgattaagccgaacatccttgtcgccatcggtatctgcacccatttgggctgctcgcccaccttccgtcccgacattgcccccgccgatttgggtgcagactggaaaggcggcttcttctgcccctgccacggttcgaaattcgacttggccggccgcgtatataaaggtgttcctgccccgaccaacctggttgtcccgccatataaatacttgagcgacacaactatcttggtgggcgaagactaa

SEQ ID NO: 71656 - DNA, 2691 bp, Neisseria meningitidis
atgtccgacaaccgcctcgacaccgcccgccgccattccctcttccttgcccgccagctcgacaacggcaaactcaagcccgaaattttcctgccgatgttggacaaggtgttgaccgaagcggatttccaagcctttgccgactgggacgcaatccgtgcggaagaaaacgaggaagagttggcgcggcagttgcgcgggttgcgccgttatgtggtgtcgcagattatcgtgcgcgatataaaccgcatcagcgatttgaacgaagtaacccgcacgattacgctgtttgccgattttgccgtcaataccgcgctggattttgcctacgcctattatcgggacatgtacggcacgccgatcgggcgttataccaaatcgccgcagcatttgagcgtggtggcgatgggtaaggcgggcggttatgagttgaatgtgtcttccgacatcgatttgattttcgtctatcccgaatcgggcgacaccgacggcaggcgcgaacggggcaatcaggaatttttcaccaaagtcgggcagaaactgattgcgttgttgaacgacattaccgccgacgggcaggtgttccgcgtcgatatgcggttgcggccggatggcgattcgggcgcgttggtattgagcgaaaccgcgctggagcaatatttgattacgcaggggcgcgaatgggaacgctacgcgtggtgcaaaggccgcgtggttacgccgtatccgaacggaatcaaatcgctggtgcgccccttcgtgttccgcaaatatctggattacggcgcgtatgaggcgatgcgtaagctgcaccgccaaatccgcagcgaagtcggcaaaaaagggatggcggacaatatcaaactcggcgcgggcggcatccgcgaagtcgaatttatcgcccagatttttcagatgatacgcggcgggcaaatgcgcgcgctgcaactgaaaggcacgcaggaaacgctggagaaacttgccgaatcgggcattatgccgtctgaaaacgtcgaaaccctgctcgccgcctaccgctttttgcgcgatgtcgaacatcgtttgcaatattgggacgaccggcaaacccaaaccctgccggcttcgcccgaacagcggcaacggctcgccgaaagtatgggatttgatgattacgccgattttttgaatgctttaaatcaacatcgaaaccaagtcaaccggttgtttaacgaaattttgagcgaacccggagaacaaacgcaaagcaacggcgaatggcagtgggtttggcaggaaaaacccgacgaagaagggcggcaatgccgtctgaaagaacacgggttcgatgccgaagccgtcgcagcaaggctcgaccaaatccgccacggccataaataccgccgcctctccgcccacgcccagccgcgtttcgatgcgcttatgccgttgttggtacgggcggcggcagcgcaaagcaacccgaccgatacattgatgcggctgttggattttctcgaaaacatcagccgccgatccgcctatctcgccttcctcaacgaacatccgcaaaccttggcgcaactggcagagattatgggccaaagttcttgggtggcggcgtatctgaacaaatatccgattttgttggacgaactcatcagcgcgcagcttttggataccgcgtttgattggcaggcactcgccgccgccctttcagacgacctcaaagcctgcggcggcgatactgaagcgcaaatggacaccctgcgccgcttccagcacgcccaagtcttccgtctcgccgtccaagacctcgccggactgtggacggtagaatccctctccgaccaactctccgccctcgctgacaccgtcattgccgccgctctttcgtgcgcgtgggcggatatgtccaaaaaacaccgcgacaccccgcaattcgccgtcgtcggttacggcaaactcggcggcaaagaactcggctacgcctccgacctcgacctcgtctatctctacgacgatccccaccccgacgcaggcgacgtgtacagccgcctcgcccgtcgcctgaccaactggctttccgccgccaccggcgcaggcagcctctacgaaaccgacctgcgcctgcgccctaatggcgacgccggtttcctcgcccacagcatcgccgcctttgaaaaataccagcgcgaaaacgcctggacgtgggaacaccaatcccttacccgcgcccgcttcatctgcggcacgcccgaaattcagacggccttcgaccgcatccgcaccgaaatcctcaccgccgaacgcgaccaaaccgccttgtcaggcgaaatcatcgaaatgcgcgaaaaaatgttccccacccatccgcctgccgacagcaacgtcaaatacgcacgcggcggcgtggtcgacgtcgaatttatcgtccaatacctcatccttgcccatgcccgaaaatatccgcaacttctcgccaactacggcaacatcgccctcttgaatatcgccgccgactgcagccttatcgacaaaaacctcgccgaacaaagccgcaccgcctaccgcttctaccgccggcagcagcacaacaccaaactgcgcgacgcggcaaaaaccgaagtaaccggcgaactgttggcacattacggcaatgtcaggaaattgtggcgggaagtgttcggcgaagaagcggcaaccgcctga

SEQ ID NO: 71657 - DNA, 1503 bp, Neisseria meningitidis
atggcaaaagtactcatcgtacccgtatctgccggactggacgcctccgccgccgcacaagcctttgcaaaagcactggacgcacaaattttccaagccgttgacgcaaccgccgaaaccctgctcgcgcaaggcaaaagcgacgactggttcgacgcactggtcggcaaagttgccgcactcgatgccgccaacctcgtcatcgaaggcatcgcgcccgatgccgacaaaatctacctcgcaggcaaaaacgtcgaactggcattgtcccttgacgcggcagccgtcttcgccgtccgttccgacaacgccgatgccgacgaactggcaaatcggctgaaccttgccaaacagttcttcgccgccgcgccgggcgtattggaaggttttgtcgtggacggcgcggcagcctccgttgccgaagcggcagccgaaaaaaccggcctgaccttcttcggttcgagcgacgcgctgaaagacgtatccgtattggcaggccgcgaagcaaaacgcctgtcgccggcgcaattccgctacaacctgatcgacttcgcccgccaagccgacaaacgcatcgtcctgcctgagggcgcagaaccccgcaccgtccaagccgccgccatctgccacgaaaaaggcattgcccgctgcgtcctgcttgccaaacgcgaagaagtcgaagccgttgccaaagaacgcggcatcagcctgcccgactctttggaaatcatcgatcccgcctcattggtcgaacaatacgtcgagccgatgtgcgaactgcgcaaatccaaaggcctgacacccgaagacgcgcgcaagcaactgcaagacaccgtggtactcggtacgatgatgatggcgcaaaatgatgtggacggtttggtatccggtgcggttcacaccaccgccaacaccatccgccccgctttgcaactgattaaaaccgcaccgggcgcaagcctcgtgtccagcgtattctttatgctgctgcccaaccaagtcctcgtcttcggcgactgcgcggttaatccgaacccgaccgcgcaacagcttgccgacatcgccatccagtctgccgattccgcaaaagccttcggcatcgacccgaaagtggcgatgatttcctactccaccgtcaactccggcagcggccccgatgtcgataccgtcatcgaagcaaccaaacttgcccgggaaaaacgccccgacctcgccatcgacggcccgctgcaatatgatgcggcaaccgtgccgggcgtgggcaaatccaaagccccgggcagcccggtggcaggacaggcaaccgttttggtcttccccgacctgaacaccggcaactgcacctataaagccgtccaacgcagtgccaacgtcttaagcgtcggcccgctgctgcaaggcctgcgcaaaccggtcaacgacctgtcgcgcggcgcgctggtggaagacatcgtgttcaccatcgccctgactgccgttcaggcaaaacaaatggaaggctga

SEQ ID NO: 71658 - DNA, 240 bp, Neisseria meningitidis; identical to SEQ ID NO: 39921

SEQ ID NO: 71659 - DNA, 1056 bp, Neisseria meningitidis; identical to SEQ ID NO: 54922

SEQ ID NO: 71660 - DNA, 1071 bp, Neisseria meningitidis; identical to SEQ ID NO: 56015

SEQ ID NO: 71661 - DNA, 2748 bp, Neisseria meningitidis
atgcaacagcaacatttgttccgattaaatattttatgcctgtctttaatgaccgcgctgcccgtttatgcagaaaatgtgcaagccggacaagcacaggaaaaacagttggataccatacaggtaaaagccaaaaaacagaaaacccgccgcgataacgaagtaaccggcctgggcaaattggtcaaaaccgccgacaccctcagcaaggaacaggtactcgatatccgcgacctgacgcgttacgaccccggcatcgccgttgtcgaacaggggcgcggcgcaagctctggctactcgatacgcggtatggacaaaaaccgcgtttccttgacggtggacggcttggcgcaaatacagtcctacaccgcgcaggcggcattgggcgggacgaggacggcgggcagcagcggcgcaatcaatgaaatcgagtatgaaaacgtcaaggctgtcgaaatcagcaaaggctcaaactcggtcgaacaaggcagcggcgcattggcgggttcggtcgcatttcaaaccaaaaccgccgacgatgttatcggggaaggcaggcagtggggcattcagagtaaaaccgcctattccggcaaaaaccgggggcttacccaatccatcgcgctggcggggcgcatcggcggtgcggaggctttgctgatccacaccgggcggcgcgcgggggaaatccgcgcccacgaagatgccggacgcggagttcagagctttaacaggctggtgccggttgaggacgacaaccaatacgctcatttcgtggtcgaagaagaatgcgaaagcgggagttatgaaaagtgtaaaagcaaaccgaaaaaagatgttgtcggcaaagacgaacgtcaaacggtttctacccgagactacacgggtcccaaccgcttcctcgccgatccgctttcatacgaaagccggtcgtggctgttccgcccgggttttcgttttgaaaacaaacggcactacatcggcggcatactcgaacacacgcaacaaactttcgacacgcgcgatatgacggttccggcattcctgaccaaggcggtttttgatgcaaataaaaaacaggcgggttctttgtccggcaacggcaaatacgcgggcaaccacaaatacggcggtctgtttaccaacggtgaaaacggtgcgctggtgggcgcggaatacggtacgggcgtgttttacgacgagacgcacaccaaaagccgctacggtttggaatatgtctataccaatgccgataaagacacttgggtggattatgcccgcctctcttacgaccggcagggcatcggtttggacaatcattttcagcagacgcactgttctgccgacggttcggacaaaaattgccgcccgagtgccgacaagccgttttcctactacaaatccgaccgcgtgatttacggggaaagccacaggctcttgcaggcggcattcaaaaaatccttcgataccgccaaaatccgccacaacctgagcgtgaatctcgggtttgaccgctttggctctaatctccgccatcaggattattattttcaaaatgccaaacgcgcctattcgttgaaaacgccccctaaaaacggcaataaaaacatcagccccaacggcaacaaggaaaaaccctattgggtcagcataggcgggggaaatgtggttacggggcaaatctgcctctttggcaacaatacttatacggactgcacgccgcgcagcatcaacggcaaaagctattacgcggcagttcgggacaatgtccgtttgggcaggtgggcggatgtcggcgcggggttgcgctacgactaccgcagcacgcattcggacgacggcagcgtttccaccggcacgcaccgcaccctgtcctggaacgcaggcatcgtcctcaaacctgccgactggctggatttgacttaccgcacttcaaccggcttccgcctgccctcgtttgcggaaatgtacggctggcgggcgggtgttcaaagcaaggcggtcaaaatcgatccggaaaaatcgttcaacaaagaagccggcatcgtgtttaaaggcgatttcggcaacttggaggcaagttggttcaataatgcctaccgcgatttgattgtccggggttatgaagcgcaaattacaaacggcaaagaagaagccaaaggcgacccggcttacctcaatgcccaaagcgcgcggattaccggcatcaatgttttgggcaaaatcgattggaacggcgtatgggataaattgcccgaaggttggtattctacatttgcctataatcgtgtccatgtccgcgacatcaaaaaacgcgcagaccgcaccgatattcaatcacatctgtttgatgccatccaaccctcgcgctatgtcgtcggcttgggctatgaccaaccggaaggcaaatggggtgtgaacggtatgctgacttattccaaagccaaggaaatcacagagttgttgggcagccgggctttgctcaacggcaacagccgcaatacaaaagccaccgcgcgccgtacccgcccttggtatattgtggatgtgtccggttattacacgattaaaaaacacttcaccctccgtgcgggcgtgtacaacctcctcaactaccgctatgttacttgggaaaatgtgcggcaaactgccggcggcgcagtcaaccaacacaaaaatgtcggcgtttacaaccgatatgccgcccccggtcgcaactacacatttagcttggaaatgaagttttaa

SEQ ID NO: 71662 - DNA, 969 bp, Neisseria meningitidis; identical to SEQ ID NO: 60918

SEQ ID NO: 71663 - DNA, 654 bp, Neisseria meningitidis; identical to SEQ ID NO: 70815

SEQ ID NO: 71664 - DNA, 867 bp, Neisseria meningitidis; identical to SEQ ID NO: 56098

SEQ ID NO: 71665 - DNA, 300 bp, Neisseria meningitidis
gtgccgtccgggaagccgccacatcccgcgcaccaagccacgacgaataaaaaatgccgtctgaacgcttcagacggcatcccgggcaaacttgcccatcgcaccctgccccgatcttgcacaaacaagcacggtacagccgatgtacccgaccacacggtttttaaagccttctgcaaaataaaggcaaaccccaccgcaatccggcgttcccctaaaaacatcttgcccaacacccccccctttttttcaggtcaaaatccaccaccgaacccgccgacggcgaaacgcagtaagtag

SEQ ID NO: 71666 - DNA, 693 bp, Neisseria meningitidis
  misc_feature 670, 671, 672, 673, 674: 'n' is a, c, g or t
atgaacgttttgatttccaacgacgacggctacctctccgaaggcatcgccgttttggcgcgcgttacggcggaatttgccaacgtcagggtggtcgcgcccgaacgcgacaggagcggggtcagcaattcgctgacgctggaacgccctttgcagttgaaacaggcgcaaaacgggttctactatgtcaacggcacgccgaccgactgcatccacatcgggcagtctgtattttcggattttcaggccgattttgtcttttcgggcatcaaccggggcgcgaatatgggggacgacacgctttattcggggacggttgcggcggcaaccgaagcctaccttatgggcatacccgccgtggcgttttccttaaacgacgcttccggacgctattgggcgaccgcagaacaggcactgtggacattgttggcgcattttttcaaaacccccccgcagtcccctattttatggaacatcaatatccccgccgtcgcgccggaagatgtgcggggcattaaaatcgcccgtttgggcaggagacaccacggtcagaacgtcatccccgcgcgcaatccgcgcggcgaacagatttattggatagggccggtcggcgaagtttccgatcgggaagagggaacggatttcggtgaatgcggcgcaggtttcatannnnncacacacttaattaattaa

SEQ ID NO: 71667 - DNA, 402 bp, Neisseria meningitidis
atgcagcaacatattgaaaagtggcaacacttgagccgggaagaacagaaaatccttgccgaagtatggggtctcgtgcaaaacgatgatcaggaggttcactatgaaatgcttaaattgaacgcacccgacgaagccagtggcgaattttggttcagaatggcagaaacactcagcaccctgccgcccaaccgttccctcgaccttagaatgaacggcggcaggctggcgaccgccgtatccatcctttccgtcatgattgaagacaatcccgacataccgcagctttgggcgcaaaaaattaccgcgctcaattatagtggattaaatttaaaccagtacggcgttgcctcgccttgtcgtactatctgtactgtctgcggcttcgtcgccttgtcctga

SEQ ID NO: 71668 - DNA, 1281 bp, Neisseria meningitidis
ttgaaggattgttttcctcaaggtctgaatggaaaaaaaacagcggtggcattaagcggcggcttggattccgtcgttttgctgcatctgcttgtccgcgccgggaaaaaaggcggttttattccggatgcattgcatatccatcacggcttgagtccccgtgccgacgattgggcggatttctgccaaaactattgcgatatgctcggggtggggctggaaacggttaagatctgcgtggaaaaaaacggtttgggcatcgaggcggcggcgcggcaaaagcgttatgccgcgtttgccgaaaaaggctttgacgttttggcgttggcgcaccacagggacgatcaaatcgaaacctttatgctggcggtcgcgcgcggcggcggtttgcgcgctttggcggctatgcccgccgtccgcccttttggggaaaaaggcattatctggcggcccttgctgcctttttcgcgccaagatatatgggattatgcccaaaaacacggtttgccgaatatcgaggacgaaagcaatagcgatacggcttatttgcgaaaccgcttccggcaccgtattttgcccgaactttcggcgcagattccccatttcgggcggcatctgttgaacaatgtccgtgccttgcaggaggatttggctttgttggacgaggtcgtcgttcaagactgccgttgggtttgcggagccggttatttcgatacggcgcggtggctgacgttttccccgcgccggaaaacccatattttgcggcattttttgaaggaaaacggcattcccgtgccgaatcagaatgcccttgccgacattgcccgggttttgacggaggcaaaaaccggacgctggaacgtgcaaggctttgaattgcatcattatgcaggcaggctgtttgtgttccgaccggaaaaaacggataaactgcggtttttgaaagacaggcagataagcggaaatttaagggaaatattggcggggcagggatttgttttaaaacgtcatccgttcggacttcccgggcatcttttggagcaggacggaatcttgcggacggttgcggcatcggacaggctggctgtcggcggtatccataaggatgtgaagaaaatccttcaggaaaagcgggttttgcccgcgctgcgcccgttttggccggtcgtcgccgacaaggacaaccgtccgctggcgttggcaaattacggtacggattttcaaatctcggtttcagacggcattttgcccgtccatccggattttcccgttttattttga

SEQ ID NO: 71669 - DNA, 330 bp, Neisseria meningitidis
atgtcattacccccatgcccacaatgcgcctccgaatacacctatgaagacgacggacaatacatctgccccgaatgcgcccacgaatggaatgaaaccgaagccgccgccgaccttgcggtggaagtgcacgatgccaacggctcggtgctgcaaaacggcgacaccgtcatcctcatcaaagacctcaaggtaaaaggcagctcgatgacagtcaaacaaggtacgaaagtcaaaggcatacgcctgcaggaaggcgatcacaacatcgcctgcaaaatcgacggcagcgcgatgaatttaaaatccgaattcgtcaaaaaagcctga

SEQ ID NO: 71670 - DNA, 2157 bp, Neisseria meningitidis; identical to SEQ ID NO: 54449

SEQ ID NO: 71671 - DNA, 1587 bp, Neisseria meningitidis; identical to SEQ ID NO: 40211

SEQ ID NO: 71672 - DNA, 786 bp, Neisseria meningitidis; identical to SEQ ID NO: 44566

SEQ ID NO: 71673 - DNA, 1290 bp, Neisseria meningitidis
atgaaaaaactcaacacccaatcgcccgatttccaagccggactcaaagccctgctggcttttgaaaccgcgcaaaaccccgaaaccgaacgcatcgtcgccgacatttgcgccgatgtgcaaaagcgcggcgatgcggctttgattgaatacaccaacaaattcgatcagacaaacgctaaaagcatcgatgatttaatactcacgcaagccgatttgaaagcggcgttcgagcgcattccgaacgacgttcagacggcattgcagaccgccgcccgccgtgtcgaaagctaccaccaacgccaaaaaatggaatcgtggagctacaccgatgaagacggcacgctgttgggacaacaaatcacaccgcttgaccgcgtcggcatttacgtccccggcggcaaggcggcgtatccgagttccgtcatcatgaacgccatgcccgcccacgtcgcaggtgtgaaagaaatcatcatggtcgtgccgacaccaaaaggcgaacgcaacgacatcgtacttgccgccgcatacgtcgccggcgtaaccaaagtcttcaccgtcggcggcgcgcaggcggttgccgccctcgcctacggcacggaaaccatcccccaagtcgataaaatcaccggtccaggcaacgccttcgtcgccgccgccaaacgccgcgtgttcggcgtggtcggcatcgacatggtggcggggccgtctgaaatcctggtcatcgccgacggcacgacacctgccgattgggtggcgatggatttgttcagccaggccgaacacgacgaaattgcccaagccatcttaatcggcacgtcgcaagcgtatctcgacgaagtagaagccgctatggaccgcctgatcgaaactatgccgcgccgcgacatcatcgaagcctcgctcggcaacaggggcgcgatgatactcgccaaagacttggacgaagcctgcgaaatcgccaactacatttcccccgaacacttggaactgtcagtcgaaaatccgcaggaatgggcgaaaaaaatccgccacgccggtgcgattttcatgggacgctacaccggcgaaagcctcggcgactactgcgccggtccaaaccatgtattgcccaccagccgaaccgcccgcttttcctcgcctttggggacatatgatttccaaaaacgctccagcctgattcaggtttcggaacagggcgcgcaaaaattaggcgaaaccgccagcgtgctggcacacggcgaaagcctgaccgcccacgcccgcgcggcagagttccgtatgaaataa

SEQ ID NO: 71674 - DNA, 336 bp, Neisseria meningitidis; identical to SEQ ID NO: 55220

SEQ ID NO: 71675 - DNA, 8400 bp, Neisseria meningitidis
atgaaccgcaccctgtacaaagttgtatttaacaaacatcgaaactgcatgatagtcgttgctgaaaatgccaaacgcgagggcaaaaacacagccgacacccaagctgtaggtattttgccaaatgatattgcgggctttgcgggttttatccattctatctctgttatctcattctccctttcattactgctcggttctgcccttatcctgacttcttcttctgctaatgcccaaggtatcgttgccgacaaatccgcacctgcacagcaacagcctaccatcctgcaaacaggtaacggcataccgcaagtcaatattcaaacccctacttcggcaggggtttctgttaatcaatacgcccagtttgatgtgggtaatcgcggggcgattttaaacaacagtcgcagcaacacccaaacacagctaggcggttggattcaaggcaatccttggttggcaaggggcgaagcacgtgtggttgtaaaccaaatcaacagcagccattcttcacaactgaatggctatattgaagtgggcggacgacgtgcagaagtcgttattgccaatccggcagggattgcagtcaatggtggtggttttatcaatgcttcccgtgccactttgacgacaggccaaccgcaatatcaagcaggagaccttagcggctttaagataaggcaaggcaatgttgtaatcgccggacacggtttggatgcccgtgataccgatttcacgcagatattgagccatgcggttaagattgatgggcctgtgtggggtaaagatgtgcgtgtgtcggcagggaaaaatgatgtctcagctgatggctctatccggtcttcacactcccctgctacgaatataaattccgacaactcactgtatgccatcgatacaggggcattgggcggtatgtatgccggtaagatcaccctgatcagcactgatcgtgatgcatccgtgcgcaatcaggggcaatggtttgcctcagccggcaatgtggcagtgaatgctgagggtaaactggtcaacacaggcatgattgcagcgacgggagaaaatcatgcggtttcacttcatgcccgcaatgttcataatagcggtacggttgcctcacaggatgatgccaatattcacagccagacgctggacaattcaggtacggtcttatcctcaggtcaattgactgtccgtaatttaggccgtctgaaaaaccataacaacggtacgatccaggctgcacgcttagatatgtcaacaggtggtttggataacacaggtaatattactcaaacaggttcacaagcattggatttggtatctgcaggcaaattcgataacagtggcaagattggtgtaagtgacgttccacagaccggtttgaatcccaatccatcagtcataccacagattccgagtactgcaacaggttcaggcagcagcactgtcttggcatctaagcctggttcaaacaatcccgtttcacctacagcacctgcaaaaaactacgccggaggacgcattcaaacaacaggagcatttgacaatgcaggatcaatcaatgcaggtgggcaaattgacattgccgcccaaaacggtttggaaaattcgggtagtctgaatgcggctaaactacgagtatcaggcgattcatttaacaatacggtaaaaggcaaactccaggcacacgatctggctgttaacactcaaactgctaaaaacagcggtcacttattaactctaaccggcaagattgacaaccgtgaactgcataatgccggagaaattgccgccaacaatctgacactcattcattcgggccgcttgagcaatgataaaaaaggcaatattcgagctgcacatttacagcttgataccgccggtttacataatgcaggtaacattcttgccgatagtggaaccgttaccaccaagaataatcttcgcaatacaggaaaagtttctgttgcacgactaaataccgaaggtcagactctagataatacgcacggacatatagaggctgaaacggttaacatccaaagtcagcaactgactaaccaaagtggccatattactgctaccgaacaactgactatcaatagtcgaaatgtagacaaccaaaacggcaaactcctatctgcaaaccaagcacaattagctgtttcagacggcctatacaaccaacatggtgaaattgccaccaaccggcagttgtctattcacgataaaaatcaaaacactttggcgttaaacaatgcggatggcacgattcaatctgccggtaatgtatcgctacaagccaaatcactcgccaacaatggcacattaacagccggtaacaaactggatattgctttgacggacgatttcgtcgtagagcgcgacctcactgcaggcaaacaattaaatctaagcataaaaggccgtctgaaaaatacccataccctacaagcaagccatacgctcaaactcaatgccggcaatatagataaccaagttacaggcaaaattattggtggagaacaaacggacatcacatccgaacagcatgttgacaacaggggcttgatcaacagcgacggtttgacccacatcggtgcaggtcaaaccctgaccaacaccgggacaggcaaaatctatggcaaccatattgccctggacgcgcaaatactgcttaaccgggaagaaacgacggaaggcagtaccaaagcgggggcaatagctgcaaggaaacgtttggatattggagcgaaagagattcataaccaagaaggtgccctactatccagcgaaggtatttttgccgtaggtaatcgactggatgaacaacatcatgcggcaggcatggccgatacctttgttaatggcagtgccggtttggaagtacaaggtgatgcattgatgtccgttcggaatatgcagaatatcaataatcactttaaaacagagacatacttagccaaagcagaaaagcaagttcgtgactacaccgtactggggcaaaatacctactatcaggcaggaaaagacggtttattcgacaactcgcaaggacaaaaagaccaaactactgctacgttccatttaaaaaatggttctcgtattgaggccaaccaatggcatgtccgagactaccacatcgagacttataaagaacgcatcatcgaaaaccggccggcacacattactgtgggcggtgatttgactgcctcaggtcaaaattggctgaacaaagacagccggattgtagtaggcgggcgtattatcactgatgatttaaaccagaaagaaattaccaatcaaagtacaacaggcaaaggtcgcacagatgctgtcggcacacagtgggattcagttacaaaaaaaggatggtacagcggtagaaaaagacaacgccgtactgaaagaaaccatactccttaccatgatacccaactatttacccacgacttcgacacgcctgtatccgtcatccaacagaatgccgcctccccttcctttcaacccgctgcatctgcaatcaaactgattgacggagtatccacggcagccgtcaatggtcagcgcatccataccggtaatgtggtctcgttaaataacgctactgttactctgcctaacagcagcctctataccacccatcctgacaataaaggctggttggttgaaaccgatcctcaatttgcagactaccgccgctggttgggcagcgactacatgttgcaacaactgcaattggacaccaatcatctacacaaacggctaggcgacggctactacgaacaaaaacttgttaatgaacaaatccatcagttaacaggctaccgccgactcgacggctacaggagtgatgaagaacaattcaaagctctgatggacaacggccttactgctgccaaaacattcggtctcaccccaggtatcgccttgagtgcagagcaagttgcccgcttaacttcagatatcgtttggatggaaaatcaaaccgtcaccctgtctgacggttcgactcaaaccgtactggttcctaaagtctatgccctggcgcgcaaaggtgatctcaatacctccggtggcctgattagtgccgaacaagtcttacttaaactgcaaaacggcaacctgactaacagcggtaccattgcggggcgacaggccgtactcatccaggcacggaatattaacagcaacggtaacattcaagccgaccaaatcggcttaaaagctgaaaaaagtatcaatatcgacggcgggcaggtacaagcaggcagactgctgactgcccaagcgcaaaatatcaaccttaacggtacaacccaaacttccggtaatgaacgtaacggcaataccgccatcgatcgtatggccggcattaacgtggtcggaagccatactgagcaagtagataacagaacttcagacggcatcctatccctgcatgccggcaacgatatcaacctcaatgcggccaccgtctctaaccaagttaaaggcggcactacccaaattaccgccggcaataatctcaacctcggcaccattcataccgaacatcgcgaagcctatggtacattagatgacgagaaccatcgccatgtccgccaaagtaccgaagtcggcagcagtatccgcacgcaaaacggcgcactgcttagagccggtaacgacttaaaaatccgccaaggcgaactggaggccgaagaaggcaaaaccgtccttgccgcgggacgtgatgtcactatcagcgaaggacgccaaataaccgaactggatacctcggtaagcggaaaaagcaaaggcatcctttccagtaccaaaacacaggatcgctaccgcttcagtcatgatgaagcagtcggcagcaacatcggcggcggcaaaatgattgttgcagccgggcaggatatcaatgtacgcggcagcaaccttatttctgataagggcattgttttaaaagcaggacacgacatcgatatttctactgcccataatcgctataccggcaatgaataccacgagagcaaaaaatcaggcgtcatgggtactggcggattgggctttactatcggtaaccggaaaactaccgatgacactgatcgtaccaatattgtccatacaggcagcattataggcagcctgaatggagacaccgttacagttgcaggaaaccgctaccgacaaaccggcagtaccgtctccagccccgaggggcgcaataccgtcacagccaaaagcatagatgtagagttcgcaaacaaccggtatgccactgactacgcccatacccaggaacaaaaaggccttaccgtcgccctcaatgtgcccgttgtccaagctgcacaaaacttcatacaagcagcccaaaatgtgggcaaaagtaaaaataaacgcgttaatgccatggctgcagccaatgctgcatggcagagttatcaagcagcccaacaaatgcaacaatttgctccaagcagcagtgcgggacaaggtcaaaacaacaatcaaagccccagtatcagtgtgtccatcacctacggcgaacagaaaagtcgtaacgagcaaaaaagacattacaccgaagcggcagcaagtcaaattatcggcaaagggcaaaccacacttgcggcaacaggaagtggggagcagtccaatatcaatattacaggttccgatgtcatcggccatgcaggtactgccctcattgccgacaaccatatcagactccaatctgccaaacaggacggcagcgagcaaagcaaaaacaaaagcagtggttggaatgcaggcgtagccgtcaaaataggcaacggcatcaggtttggaattaccgccggaggaaatatcggtaaaggtaaagagcaagggggaaatactacccaccgccacacccatgtcggcagcacagccggacaaaccaccatccgcagcggcggggataccaccctcaaaggtgcgcagctcatcggcaaaggcatacaggcagatacgcgcaacctgcatatagaaagtgttcaagatactgaaacctatcagagcaaacagcaaaacggcaatgtccaagttactgtcggttacggattcagtgcaagcggcagttaccgccaaagcaaagtcaaagcagaccatgcctccgtaaccgggcaaagcggtatttatgccggagaagacggctatcaaatcaaagtcagagacaacacagacctcaagggcggtatcatcacgtctagccaaagcgcagaagataagggcaaaaacctttttcagacggccaccctcacccatagcgacattcaaaaccacagccgctacgaaggcaaaagcttcggcataggcggcagtttcgacctgaacggcggctgggacggcacggttaccgacaaacaaggcagacctaccgacaggataagcctggcagccggctacggcagcgacggagacagcaaaaacagcaccacccgcagcggcatcaacacccgcaacatacacatcaccgacgaagcgggacaacttgcccgaacaggcaggactgcaaaagaaaccgaagcgcgtatctacaccggcatcgacaccgaaactgcggatcaacactcaggccgtctgaaaaacagcttcgacaaagacgcggtcgccaaagagatcaacctgcaaagggaagtaacgaaggagttcggcagaaacgccgcccaagccgtagcggccgttgccgacaaactcggcaatacccaaagttacgaacggtatcaggaagcccgaaccctgctggaggccgaactgcaaaacacggacagcgaagccgaaaaagccgccatccgcgcatccctcggccaagtaaacgcctaccttgccgaaaaccaaagccgctacgacacctggaaagaaggcggcataggcaggagcatactgcacggggcggcaggcggactgacgaccggaagcctcggcggcatactggccggcagcggcacttcccttgctgcaccgtatttggacaaagcggcggaaaacctcggtacggcgggcaaagcggcggtcaacgcactgggcggggcggcaatcggctatgcaactggtggtagtggtggtgctgtggtgggtgcgaatgtagattggcataatcggcagttgcatccgagtgaaagagattggataagaaaaaatgcacaagcttttgcgaaacaggaggtaggtggtagagaacccactatagatgaaattgcattagcagaaaaacgactagcacaacaggcggctaaagagacagatttgttttggatgctaacattagaaaaagtaacagatttatcagctcaaaaattcctaagacaagcaaaaggaacttttacaaatgaaaatggtacgcagcaacaattttttactacgcaagggaagcaatttatgcgtcctgaattgtttgctaatgaagtatatgatctgtctttttacaaaaaccatttacaatctcctaaaaatagtagtatcagcaagggtacaggagaattggctcgaagagttacttcatctacttgggataaagcaaaacaagatcctattttgacaggattgcaaatagctgcctcccctgtacatttagttcgggatgtaggtaaggcaagctggcagtgcgtaagcggctttggacaatgtttgcaacaaggaaaagagaattttgtagaaacaggttctgcaattggaacaggaactgcctcttttcaactaaacgaccttaagccgatttatggtcaagatgtacgtggtgcacaagcaggattggttgcactacaaacggcagatggaataactacggcattgggtgcagcaaaagcattaaatgttgcaggaaaaggtagtcgctattttataaatgaatgggctagtagtccgcctagtggttctcgtgctgcacagcgtggggcagtggggaatttaacccattcgcaacaagttttgacagatggttcacatattcaacgtggcggaaaacttttacctaatattcgctataaagcaggcgagtttgattatttatatgaaactgatactttaggtagaattaaaagttttgaaacagataatttgcaattaacacagagagatagattaaagcataattcaaaaactcctgataaagtcaaggggcaagaccatgcaggacatttaattggagatagatttggaggttcgcccaatttagataatttagtgtcacagcacaaagatgtaaacttaagtgcgtataaagttttggagaataaatgggcggaagcaattaaatcaggaaaaaatgttaaaatccaaatgcaaattgaatatgcagcaggtacaagacaccctacacgatttgttggatattattggattgatggtaaaccaactagaattaatattaataatttatga

SEQ ID NO: 71676 - DNA, 2106 bp, Neisseria meningitidis; identical to SEQ ID NO: 61966

SEQ ID NO: 71677 - DNA, 651 bp, Neisseria meningitidis; identical to SEQ ID NO: 55477

SEQ ID NO: 71678 - DNA, 1497 bp, Neisseria meningitidis; identical to SEQ ID NO: 54470

SEQ ID NO: 71679 - DNA, 2028 bp, Neisseria meningitidis; identical to SEQ ID NO: 50348

SEQ ID NO: 71680 - DNA, 510 bp, Neisseria meningitidis; identical to SEQ ID NO: 54788

SEQ ID NO: 71681 - DNA, 924 bp, Neisseria meningitidis
atgcttctaacactttctttgcgtgattttgtcattgttgaaaatctgaatctggattttcaaagcggctttaccgtattgaccggagaaaccggcgcgggcaagtccattactttggatgcgattggtctgctgttgggcgacaaagccgattacagccaagtccgcagcggtgcaaaagaagcgcagttgtcggcattgttcgatatttcccatttgcctgttttaaaagcagaattgtatgaacaggggcttttaaacgacggagaagaagaactcagtatccgccgcattatcgatgccaaaggcaaaagccgcagctttatcaacaatcaggccgctaccttggcgcaactcaaatccgtcggtagccagcttatcgacatccacgggcaaaacgcccatcattcgcttaatcaggaagccgcccagcgcgaattgttggacgcatttgcgggtagcagggagcaggcggaaaccgtcaggcagctttatcaaaattgggccaatgcgaaaaaagccctccaagaggcgcaggaacacgccgatgccgtcattatcgagcgggagcgtctggaatggcagtttaacgaactgaatcagttggacattaaacaaggcgaatgggaagccctcagccaaagccacgacagccttgcccattctgccgagctgttgcaggctgccgaagaagtcggaagcaagattgacggcgacaacggcatccaacgccatatctatcaatgtcaaaaactattggccaatctgcaaaacatcgagccgcgctttgccgagagcctgaatatgttggcaagcatcgaagccgaattgggcgaaatcagtgccaatatgcgcgatgtggcaggtcgcagcgacatcaatcccaatgaattggcggcacagaacagcgcatgggcgaactga

SEQ ID NO: 71682 - DNA, 1671 bp, Neisseria meningitidis; identical to SEQ ID NO: 62872

SEQ ID NO: 71683 - DNA, 786 bp, Neisseria meningitidis
atgagcagaatccggcaggcttttgccgctttggatggcggaaaggcattgattccctatattacggttggagacccggatattggggcgactttggcaataatgcacagtatggtggaaaacggtgcggatattttggagttgggcgtgccgttttccgatccgatggcggatggaccggttattcagcgtgcggcggagcgggcgttggcgaacgggatttcgctgcgcgatgtcttggatgtcgtcagaaaattccgtgaaaccgacacgcaaactccggttgttttgatgggatatttgaaccctgtacataagatgggttatcgggagtttgctcaggaagccgcaatggcgggtgtggacggcgtgttgacggtggattcccctgtcgaaaccatcgatccgctctatcgcgagctgaaggataacggggtcgactgtattttcctgattgcgccgacgacgacggaagaccgtattaaaaccattgccgagctggcaggcggatttgtctattatgtttcgctcaagggcgtaacgggcgcggcaagtttggatacggatgaggtttcgcgtaaaatagagtatttgcatcagtatatcgatattcccatcggtgtcggtttcggcatcagcaatgcggaaagcgcgcgcaaaatcggccgggttgccgacgcggtcattgtcggcagccggattgtgaaagagattgaaaacaatgcgggcaacgaggctgcggccgtcggtgctttggtcaaagagttgaaggatgccgtgcgctga

SEQ ID NO: 71684 - DNA, 540 bp, Neisseria meningitidis
atgtcccaagtttttaaagattttgatttgtcctccgtatgggaatccgacagttgggcagatgaaaactaccaagaagccccgtttacccctgaaattttggctgccgtagaaagtgaactgggctataaattgccgcaaagttttattgaattgatggcggtacaaaacggcggaatatttgtcaaaaactgttttccgaccacacagagaaattcgtgggcggaaaatcatgtgcaaatttgcgaggtatcgggcatcggctttgaaaaagaagggagtttgtgcggcgaaacagggcaaaaactttggctggaagaatgggaatatccgcccatcggcgtgtattttgccaacgacccgtcaggcggtcatgccatgtttgccttggactatcgggcgtgcggcaaagacggcgagccgaaagtggtgtttgtcgagcaagaatcggattttgaaatcgtcgaacttgcccccgattttgaaacctttatccgcagcttgcggcatgaagatgagtttattgacgaggaaatataa

SEQ ID NO: 71685 - DNA, 2274 bp, Neisseria meningitidis; identical to SEQ ID NO: 54773

SEQ ID NO: 71686 - DNA, 1788 bp, Neisseria meningitidis; identical to SEQ ID NO: 54387

SEQ ID NO: 71687 - DNA, 723 bp, Neisseria meningitidis
gtgtttcccgacaaatacaagttgagtttgaaagaaaatatttttttggcaaagaaagtattggttgcccaaattcacaacctcagccgttttgagaattgtcagacgaccttgttgcagaccgaacaaattatccatggcaaaaatgtagcctccgcgtcactggaagacatccaaaccatcttgaacctgaaacgtgcctatcaatatgtgatttcgcatatttcaaacggcgaaccggtcgatatttcactccttaaaaaaatcaacaacattgttgccaaggacgattctttggcacccggtgatttccgtaccggttcggtcggcgtaacgctattggacggttcccgtcatgccccaaatccggtgaaggaaattgaagtggctcgcgtgttacaaaatatcggactgcaaagcggttcgacgacggaggcagccgtccgttttatgctttattgtatgcggcagcaggttttttgggacggcaacaaacgaacggcaaccttatttgccaatggtctgatgatggagaggggccgtggcatcttggaaatctccgaaatgcagatgccgcaattcaatgaaaaactgtccgcattctatcgctcgggtgacgataccgatatttccaagtttgtgtatcaaaattgtatatcgggcatagactatttcggcgcggacgaagatatagatttccccgacccaccaaacatgggctaa

SEQ ID NO: 71688 - DNA, 585 bp, Neisseria meningitidis; identical to SEQ ID NO: 36844

SEQ ID NO: 71689 - DNA, 1056 bp, Neisseria meningitidis; identical to SEQ ID NO: 55146

SEQ ID NO: 71690 - DNA, 1413 bp, Neisseria meningitidis
ttgttgtttgaatttaaagagaataaaatgattgttacttcccgttggcccttgctggaaaaggcatttttacggtttggaatgcctgttgccgtggttgatttggaatcgacgggcggcaatctgtatgaagacagggtaaccgaagtggctttggtcaagtttgagcagggaagggtggtgaggcatgagtggttggttaatcctcaaaaaccgattccgcagtttgttgcggggctgacggggatttcagacggcatggttgccgacgcacctgtttttgcagagattgccggcgagttgttttcggtattgaagggttgtgtgctggttgcacataacagccgtttcgactatacgtttttaaagcatgagtttcatcgtgcgggtatcggattttcatcgcctgctttgtgcagtgtgcaactgtcccggtgtctgtatccgcaattttacaagcacagcctggacagtatcatcgaaaggttggggattgttgtggaagacaggcatcgtgcgatggcggatgtatcggcattgtgcgattatttggaatacagtctgtcggaacacggggtcgaggcatggatcaggcagtgtttccgtttgatgaatccgaaaccgctgcctgccgcgctgcccgaacggttgagggaacagttgtacggtttgcctgacagtatgggggtgctggcttgtttcgacggaggagggaaagtaaattacatcggtacgtttgaacgggtatatagcgaggtttcggctttattggattccggaaaagccccgtttgattggtgcaatacggaggaagtccgtttttttcctgcattgggcagcctgcatgcatataagattaaagcggaattggtcggacgttatcattcgggttgttatgtatctgccaaaaatctgcttaaaacatttacgaccgtcaggtttgaaaaaggttcagacggcatgttgaatgcgaaaacagcggctttgaaaaacggtgtgacggataatccgcctaccggattatttgccaataaaaaggcggcgagacgggctttgtcgtcgtgggcggaaacatacggattgtgtcctgcctcagccggtatccttccggacggttatgcagaggatgagccttgtcccgtatatgtttcaggccgatgcgataaggcgtgcggccgttctgacgaacaggttttggcgtttgcacacaagttgcctattttggattggggaaaaatgcatgaggtagaaattaccgaaactgatcctttaacgggggaaaaagttgttctgcacggaatgggcggcgcattggaaatgggtgacgggctttggtatttcgataaagatttaccggatgcgtttaaggcgaagtttaaaacggacaggaaaaatattaaggaaatcggttaa

SEQ ID NO: 71691 - DNA, 207 bp, Neisseria meningitidis; identical to SEQ ID NO: 39405

SEQ ID NO: 71692 - DNA, 1701 bp, Neisseria meningitidis; identical to SEQ ID NO: 55149

SEQ ID NO: 71693 - DNA, 321 bp, Neisseria meningitidis
atgattacccttaccgagaatgccgcaaaacacatcaatgactatctcgccaaacgcggcaaaggcttgggcgtacgcttgggtgtgaaaaccagcggctgctcggggattgcgtacaaccttgaatttgtcgacgaagccgatggcgacgacctgattttcgaaggacacggcgcgcgcatttatatcgatccgaaaagcctggtttatctggatggcacgcaagtcgattacaccaaagaaggtttgcaggaaggtttcaaatttgaaaaccccaatgtcaaagactcctgcggctgcggcgaaagcttccacgtttaa

SEQ ID NO: 71694 - DNA, 633 bp, Neisseria meningitidis
atgctcaacattcaaaatccgatgtttctgatgctgatgagcgacagcccacagctgcgcgagtttctggtgcgcaatatcgacaacatcgccaacgatacagaagcctttataaaccgctacgacctcaaccgtcatatgatttacaatactctgctgatggtagagggtaagcagcttgatcggttgaaacaacgtagcgagaaagtcttggcgcatcccacccctagcaaatggctgcaaaagcggttgtacgattaccgcttcttcctcgctttcgccgaacaggatgccgaggcgatgaaggccgccttagagccgctttttgataaaaaaaccgcgcgtatggctgcaaaagaaacattgtcctatttcgatttctacctgcagccgcaaatcgttacctacgccaaaatcgcatccatgcacggtttcgatttgggcatagatcaagaaatcgcaccgagggatttgattgtttacgatccgctgccggcagacgaatatcaagacatcttcgattttatgaaacagtatgacttgtcttacccgtatgaatatctgcaggattggatagattactatacgttcaaaaccgataagctggtatttggtaacgcgaagcgagagtga

SEQ ID NO: 71695 - DNA, 675 bp, Neisseria meningitidis
  misc_feature 652, 653, 654, 655, 656: 'n' is a, c, g or t
atgaagataacgcactgcaaattaaagaaaaaagtacagaaagaactgctccgtttttttgtactcgaagttaccgcccgttctgccgccgatattttgggtatccatcccaattcggcagcactgttctaccgtaaaatccgcacggttatcaaccatcatttggccttggctgccgatgaggtttttgagggccctgtcgagccggacgaaagcgatttcggcggacggcgtaaaggcagacgtggtcgcggtgcggcaggaaaagtggttgtcttcggcattctgaaacgcaacggacgggtctataccgttgtcgtaaacaatgccaagtctgaaacgttactccctgtcatcaaaaagaaaatcatgccggacagtattgtttataccgatagtctgagcagctgcgacaagttggacgtgagcggttttatccattaccgcatcaaccattccaaggagtgtgcagaccgtcagaaccacattaacggcattgagaacttttggaatcaggcaaaacgcgtcttgcgaaaatacaacggaatcgatcgtaaatctttcccgctgttcttgaaagaatgcgaatttcgatttaacttcggcacaccgtctcaacagcttaaaatcctgcgggattggtgtggaattnnnnncacacacttaattaattaa

SEQ ID NO: 71696 - DNA, 402 bp, Neisseria meningitidis
atgccgtctgaagccttcagacggcatcgtgcctatcgggagaataaattgcagcctttagtcagcgtattgatttgcgcctacaacgcagaaaaatatttcgcccaatcattagccgccgtcgtgaatcagacttggcgcaacttggatattttgattgtcgatgacggctcgacagacggcacacttgccattgccaaggattttcaaaagtgggacagccgtatcaaaatccttgcacacgaccgcctcctgaaccgcaaacagcaaaggcgcgattcccccgccaacacattcaaacaccgcctgatccgcgccttgaccaaaatcagcagggaaagggaaaaacgtcggcaaaggcgcgaacagttaatcggcaagatcattgtgcctttccaataa

SEQ ID NO: 71697 - DNA, 5484 bp, Neisseria meningitidis; identical to SEQ ID NO: 55127

SEQ ID NO: 71698 - DNA, 1044 bp, Neisseria meningitidis
  misc_feature 1029, 1030, 1031, 1032, 1033: 'n' is a, c, g or t
atgaccctgttttgcgaacaagtcccctacccccgccttgccgaagagtttggtacgccgctttatgtgtacagcaaatctgcgctgaccgaggcatttgaaaactaccaaaccgcgtttgccactttaaatccgcttgtctgctacgcagtgaaagccaatggcaacctgagcatcatcaagcactttgcttctttggggagcggttttgacattgtgtccgacggcgagttggcgcgtgttttagcggcaggcggcgatgcggcgaaaacgattttttccggcgtgggcaagagtgaagcagaaattgagtttgcgctgaatgcaggcgtgaaatgcttcaatatggagagcattcccgaaatcgaccgcattcagaaagttgccgcgcgtttgggtaaagtcgccccggtttccctgcgcgtcaaccccgatgtcgacgctaaaacccatccttatatctccaccggcctgaaagccaataaattcggtattgcctatgccgatgcgcttgaggcctatcgtcatgcttcccgacaaagccatttgaaaattgtcggcatcgactgccatatcggttcgcaactgaccgacctcagcccgcttgtcgaagcctgtgaacgtatcttggtcttggtcgatcaactggcagacgaaggcattgtgttggaacacttggacttgggcggcggtgtcggcattgtttaccaagatgaaaatgtgcctgatttgggcgcgtatgcccaagccgttcaaaaactgatcggcacacgccgtctgaaactcattcttgagcccggccgcagcttggtcggcaacgcaggttcgctgctgacacgcgtcgaattcgtcaaatacggcgaagagaaaaactttgtgatggtcgatgcggcgatgaacgatttgatgcgcccggcgctttatgatgcctatcatcacatcgaggcggtcgaaaccaaagacattgagcctctgaccgccaacatcgtcggtccgatttgcgaaaccggcgacttcctcggcaaagannnnncacacacttaa

SEQ ID NO: 71699 - DNA, 1854 bp, Neisseria meningitidis
atgaaccgttatcctttatggaaatatctgctgattgtgttcacgattgcggttgccgcagtgtattcgctgcccaacctattcggcgaaacacccgccgtgcaggtatcgaccaaccgacaagccatcatcatcaacgaacagactcaatccaaagtggatgccgcgctgcaaaacgcgggtattcagaccgacgggatgtttgttgtggacaattcactgaaagtgcgtttcaaagacaccgaaacgcagcttaaagcgcgcgacgtcatcgaaaacactttgggcgaaggctatattaccgcgctcaacctgttggcggacagccccgaatggatggcgaaaatcaaagccaatccgatgtttttgggtttggacttgcgcggcggcgtgcatttcaccatgcaggtcgatatgaaagcggcgatgcagaaaacgtttgaacgttattcgggcgacatccgccgcgaactgcgccgcgaaaaaatccgcagcggcacggtgcgtcaggctggaaacagcctgaccgtccctttgcaggatgcaggtgatgtgcaaaaggctctgccgcagttgcgcaagctgtttcctgaagcaacgctgaattcagacggcagcaatatcgtcttgacgctttcggaagaggcggtcaataaagtgcgttccgatgcggtcaaacagaacatcactaccctgcacaaccgtgtgaacgagttgggcgtggccgaacccgtcatccagcagtccggtgccgaccgtatcgtcgtgcagcttccgggcgttcaggatactgccaaggcaaaagacatcatcggccgtaccgcgactttggaattgcgtatggtggaggacgatcctgccaagttgcgcgaggcattggaaggcaacgtgccgagcggttatgagctgctttcaagcggcggagatcgtcccgaaattctgctgatcagcaaacaggtcgagctgacgggcgacaacatcaacgatgcgcaaccgagtttcgaccaaatgggcgcacctgccgtcagtctgagcttggacagcgcgggtggcagcattttcggcgaactgactgccgcaaatgtcggcaaacgcatggcgatggttttgatcgaccaaggaaaatccgaggttgtaaccgcgccggttatccgtactgccattacaggcggacgcgtggaaatttccggaagcatgacgacagccgaagccaatgatacgtctttgctgttgcgtgccggttctcttgccgcaccgatgcagattgtcgaagaacgtaccatcggtccgtctttgggtaaggagaacatcgaaaaaggcttccattcgactttatggggttttgccatcgttgctgcattcatggtggtttactatcgtctgatgggtttcttttctaccattgcattgagtgccaacatactgttcctaatcggtattttgtctgctatgcaggcaacgttgacgttaccgggtatggccgcgctggcgttgactttgggtatggcaatcgactccaacgtcttgattaacgaacgtatccgcgaagaattgcgtgccggcgtgccgccgcagcaggcaatcaatctcggtttccaacacgcatgggcgaccattgtcgattccaacctgacttcgctgattgccggtatcgcgcttttggtattcggttccggcccggtacgcggttttgcggtcgtacactgtttgggtattctgacttcgatgtattcgtccgtcgtcgtattccgtgcgttggtcaatctgtggtacggacgcagacgcaaattgcagaatatttccattggttcggtgtggaagccgaaagccgaaatagcaggaggcaaggagtaa

SEQ ID NO: 71700 - DNA, 213 bp, Neisseria meningitidis; identical to SEQ ID NO: 48329

SEQ ID NO: 71701 - DNA, 1449 bp, Neisseria meningitidis
  misc_feature 4, 5, 6, 7, 8: 'n' is a, c, g or t
gtgnnnnnctgcgacaaagccggcagctttttcggtgcggacaaaaaagaagcatccttcgtagaacgcatcgaacacaccaaagacgacggcagcgtcagtatgctgctgcccgactttgtccaactggttcaaagcgaaggcccggcagtcgtcaatattcaggcagcccccgccccgcgcacccaaaacggcagcggcaatgccgaaaccgattccgacccgcttgccgacagcgacccgttctacgaatttttcaaacgcctcgtcccgaatatgcccgaaatcccccaagaagaagcagatgacggcggattgaacttcggttcgggcttcatcatcagcaaagacggctatattctgaccaatacgcacgtcgttaccggcatgggcagtatcaaagtcctgctcaacgacaagcgcgaatataccgccaaactcatcggttcggatgtccaatccgatgtcgcccttctgaaaatcgacgcaacggaagagctgcccgtcgtcaaaatcggcaatcccaaagatttgaaaccgggcgaatgggtcgccgccatcggcgcgcccttcggcttcgacaacagcgtgaccgccggcatcgtgtccgccaaaggcagaagcctgcccaacgaaagctacacacccttcatccaaaccgacgttgccatcaatccgggcaactccggcggcccgctgttcaacctgaaaggacaggtcgtcggcatcaactcgcaaatatacagccgcagcggcggattcatgggcatttccttcgccatcccgattgacgttgccatgaatgtcgccgaacagctgaaaaacaccggcaaagtccaacgcggacaactgggcgtgattattcaagaagtatcctacggtttggcacaatcgttcggtttggacaaagccggcggcgcactgattgccaaaatcctgcccggcagccccgcagaacgtgccggcctgcaggcgggcgacatcgtcctcagcctcgacggcggagaaatacgttcttccggcgaccttcccgttatggtcggcgccattacgccgggaaaagaagtcagcctcggcgtatggcgcaaaggtaaggaaatcaccgttgccgtcaaactgggcaatgcttccgaacaaaccggttcctcgtccgagccggacaaagccccttatgccgaacaccaatccggtacgttctcggtcgaatccgcaggcattacccttcagacacataccgacagcagcggcggacggcttgtcgtcgtgcgggtttcgggggcggcagaacgcgcaggcttgaggcgcggcgacgaaatccttgccgtcgggcaagtccccgtcaatgacgaagacggtttccgcaaagctatggacaaggcaggcaaaaacgtccccctgctggtcatgcgccgtggcaacacgctgttcatcgcattaaacctgcaataa

SEQ ID NO: 71702 - DNA, 1101 bp, Neisseria meningitidis
atgacccgtatcgccatcctcggcggcggcctctcgggaaggctgaccgcactgcagcttgcagaacaaggttatcagattgcacttttcgataaaggctgccgccggggcgaacacgccgccgcctatgttgccgccgccatgctcgcgcctgcggcggaagcggtcgaagccacgcctgaagtcatcaaactgggcaggcagagcatcccgctttggcgcaacatcagaggccatctgaaaacgcctgccatgatgcaggaaaacggcagcctgattgtgtggcacgggcaggacaagccattatccagcgagttcgtccgccatctcaaacgcggcggcgtggcggatgacgaaatcgtccgttggcgcgcagatgaaatcgccgaacgcgaaccgcaactcggcggacgtttttcagacggcatctacctgccgaccgaaggccagctcgacgggcggcaaatattgtctgcacttgccgacgctttggacgaactgaacgtcccctgccattgggaacacgaatgcgtccccgaaggcctgcaagcccaatacgactggctgatcgactgccgcggctacggcgcaaaaaccgcgtggaaccaatcccccgagcacaccagcaccctgcgcggcatacgcggcgaagtggcgcgggtttacacacccgaaatcacgctcaaccgccccgtgcgtctgctccatccgcgttatccgctctacatcgccccgaaagaaaaccacgtcttcgtcatcggcgcgacccaaatcgaaagcgaaagccaagcccccgccagcgtgcgttcagggttggaactcttgtccgcactctatgccatccaccccgccttcggcgaagccgacatcctcgaaatcgccaccggcctgcgccccacgctcaaccaccacaaccccgaaatccgttacaaccgcgcccgacgcctgattgaaatcaacggccttttccgccacggtttcatgatctcccccgccgtaaccgccgccgccgtcagattggcagtggcactgtttgacggaaaagacgcgcccgaacgcgatgaagaaagcggtttggcgtatatccgaagacaagattaa

SEQ ID NO: 71703 - DNA, 348 bp, Neisseria meningitidis
atgagaaaaagtcgtctaagccggtataaacaaaataaactcattgaactgtttgtcgcaggtgtaactgcaagaacggcagcagagttagtaggcgttaataaaaataccgcagcctattattttcatcgtttacgattacttatttatcaaaacagtccgcatttggaaatgtttgacggcaaagtagaagcagatgaaagttattttggcggacaacgcaaaggcaaacgcggtcgcggtgctgccggtaaagtcgccgtattcggtcttttgaagcgaaatggtaaggtttatacggttacagtaccgaattcaaaccgctactttatttcctattatccgtga

SEQ ID NO: 71704 - DNA, 468 bp, Neisseria meningitidis
atgacgggatttaatgatgccgccggtgtggcatcctccgccgacatcaaaggcaaatatgttgagaaagttgaagtcgcaaacggcgtcattaccgccgaaatgaaatcaagcggcgtaaacaaagaaatccaaggcaaaaaactctccctgtgggccaagcgtcaagccggttcggtaaaatggttctgcggacagccggttacgcgcaccgccaacaacaccgccaacgacgaagtcaccgccgccaacggcaagaccaagaagatcgacaccaagcacctgccgtcaacctgccgcgatgcggcatctgccatttgcacaagaacaccacgcgccgacttcaaacacttccaaaaaatcagccgttaccgagtattgcccgaatcacggcacatggccgaaaaacttcgtcattcccgcgcaggcgggaatctagccttgtcggtgcggaaacttatcgggtaa

SEQ ID NO: 71705 - DNA, 1008 bp, Neisseria meningitidis; identical to SEQ ID NO: 70739

SEQ ID NO: 71706 - DNA, 741 bp, Neisseria meningitidis; identical to SEQ ID NO: 55109

SEQ ID NO: 71707 - DNA, 810 bp, Neisseria meningitidis; identical to SEQ ID NO: 70987

SEQ ID NO: 71708 - DNA, 1362 bp, Neisseria meningitidis; identical to SEQ ID NO: 54822

SEQ ID NO: 71709 - DNA, 840 bp, Neisseria meningitidis
gtgaaacgaatttttctgtttttggctaccaatatcgctgttttggtcgtaatcaacattgttttggcggttttgggcatcaacagccggggcggcacgggcagcctgttggcgtattccgccgtcgtcggcttcactggttcgattatttcgctgctgatgtccaaattcatcgccaaacaatcggtcggcgcggaagttatcgacacgccgcgcaccgaagaagaagcctggcttttgaacactgtcgaagcccaagcgcggcaatggaacctgaaaacgcccgaagtcgccatctaccactcccccgaacccaatgcctttgccacgggcgcatcgagaaacagctccctgatcgccgtcagcaccggtttgctcgaccatatgacgcgcgacgaagtggaagccgtattggcgcacgaaatggcacacgtcggcaacggcgatatggttacgctgacgctgattcaaggcgtggtcaataccttcgtcgtgttcctgtcgcgcattattgccaacctgattgcccgaaacaacgacggcagccagtcgcagggaacttatttcctagtcagcatggtattccaaatcctgttcggcttccttgccagcttaattgtcatgtggttcagccgacaacgcgaataccgcgccgacgcgggcgcggcaaaactggtcggcgcgccgaaaatgatttccgccctgcaaaggcttaaaggcaacccggtcgatttgcccgaagaaatgaacgcaatgggcatcgccggagatacgcgcgactccctgctcagcacccacccttcgctggacaaccgaatcgcccgcctcaaatcgctttaa

SEQ ID NO: 71710 - DNA, 618 bp, Neisseria meningitidis
  misc_feature 6, 7, 8, 9, 10: 'n' is a, c, g or t
gtgtgnnnnnacagatatacggctctcgcgcatccgagccaggaggattttgacgggcattcgggattccccgagttttccattgatgaacggcggcgggaaatttctgtcgaaacctttggcttggatattggaaagcctgttctggcattttgcccgggcgcggaattcgggccggcaaagcgttggccgacaaggcattttgccgagttgggcaaacattatctggcggcgggttggcaggtttggttgttcggttcgcaaaaagatgatgaaattgccgaggaaatcaaccgcctttcagacggtatgtgtgtcaatttgtgcggcaaaaccgatttgtcgcaggcaatggatttgttgtcgttggcagatacggttgtgtgtaacgacagcggattgatgcacttggcggcagctttgggcaggaaggtagtggcggtttacggttcttccagcccgacgcatacgccgcctttgagcgacagggcgaaaatcgtcagcctgcacttggaatgttccccgtgtttcaaacgagaatgtccgctggggcataccgactgcctcaacaggctgtatcccgagaagattgtgcaggcggttgaagaggcggtatga

SEQ ID NO: 71711 - DNA, 1257 bp, Neisseria meningitidis; identical to SEQ ID NO: 54292

SEQ ID NO: 71712 - DNA, 864 bp, Neisseria meningitidis; identical to SEQ ID NO: 37982

SEQ ID NO: 71713 - DNA, 288 bp, Neisseria meningitidis; identical to SEQ ID NO: 43125

SEQ ID NO: 71714 - DNA, 1008 bp, Neisseria meningitidis; identical to SEQ ID NO: 70739

SEQ ID NO: 71715 - DNA, 687 bp, Neisseria meningitidis
atgacggtgttgcaagaacgttattgtgaggtgtccgaccgtatcggaaaattggttctgcaggcgggaaggaagccgcattccgtcagcctgattgccgtcggtaagactttcccttcagacggcgtccgcgaagtttacgccgccggacagcgtgatttcggcgagaactatattcaggagtggtacggcaaaacggaagagttggcggatttgaccgacatcgtgtggcacgtcatcggcgatgtgcagtccaataaaaccaaatttgtcgccgaacgcgcgcattgggtgcataccgtatgccgtctgaaaaccgctgtccggttgagcgaacagcgtccttcctcaatgccgcccttgcaggtgtgtatcgaggtgaatattgcgggcgaggcggtgaagcacggtgtcgcgcccgaagaagcagtcgcgcttgctgtggaagtggcgaagctgccgaatatcgtcgtacgcggactgatgtgtgttgccaaagccaacagcagtgaaacggagttgaaggtgcaatttcaaacgatgcggaaactgcttgccgacctcaatgcggctggcgttaaggcagacgtgctgtctatggggatgtcggacgatatgcctgccgccattgagtgcggtgcgacacacgtccgtatcggcagcgcgattttcgggaaaaggggctga

SEQ ID NO: 71716 - DNA, 1095 bp, Neisseria meningitidis; identical to SEQ ID NO: 54326

SEQ ID NO: 71717 - DNA, 1113 bp, Neisseria meningitidis
atgaccgcaaaggaagaactgttcgcatggctgcgccatatgaacaaaaacaaagattccgacctgtttgtgacgacccatttcccgcccgcaatgaagctggacggcaaaatcacccgcatcacggacgaaccgctgacggcggaaaaatgtatggaaatcgccttttcgattatgagtgcgaagcaggcggaagaattttcatcgaccaacgagtgcaacttcgccatcagcctgccggacaccagccgcttccgcgtcaatgcgatgatacagcgcggcgcgacggcgttggtattccgtgcgattaccagcaagattcccaagtttgaaagcctgaacctgccgccggtcttgaaggatgtcgcgctgaaaaaacgcgggctggttatttttgtcggcggcaccggctcgggcaaatcgacttcgcttgcctcgcttatcgattaccgcaatgaaaattcgttcggacatatcatcaccatcgaagacccgatcgagtttgtccacgaacacaaaaactgcatcatcacccagcgcgaggtcggcgtggatacggaaaactggatggcggcgttgaaaaacacgctgcgtcaggcgccggatgtcatccttatcggcgaaatccgcgaccgcgaaacgatggactacgccattgcctttgccgaaacggggcatttgtgtatggcgacgctgcacgccaacagcaccaatcaggcactcgaccgcatcatcaactttttccccgaggagcggcgcgaacaattgctgacggatttgtcgctcaaccttcaggcgtttatttcgcaacgcctcgttccgcgagacggcggcaagggcagggtggcggcagtcgaggtgctgctcaattcgcccctgatttcggagttgattcacaacggcaacatccatgaaatcaaagaagtgatgaaaaaatccactaccctgggtatgcagaccttcgatcaacacctttaccaattgtatgaaaaaggcgatatttccctgcaagaagcattgaaaaatgccgattccgcacacgatttgcgtttggcggtacagttgcgcagccgccgcgcgcaaagttccagccccgatttggaactgctctga

SEQ ID NO: 71718 - DNA, 1296 bp, Neisseria meningitidis
atggctatttaccaatcaggcgtgatttttgaccaagtggataccgccaatcccgattgttggacattggacgaatacgtcaaacgcggcggctataccgccctgcgtaaaatcctgtccgaaaacatctcgcaaaccgatgtgattgacgaagtcaaaacctccggcttgcgcgggcgcggcggtgcgggcttcccgaccggtttgaaatggagctttatgccccgttccttccccggcgaaaaatacgtcgtctgcaataccgacgaaggcgaaccgggtacgttcaaagaccgcgacatcatcatgttcaacccccatgctctgattgaaggcatgattatcgccggttacgcgatgggcgcgaaagccggttacaactatattcacggcgaaattttcgaaggctaccaacgctttgaggccgctttggagcaggcgcgtgccgcaggctttttgggtaaaaatattttgggttcggattttgaattcgaactcttcgcccaccacggttacggcgcatatatttgcggcgaagaaaccgcattgctcgaatcgctggaaggcaaaaaaggccagccgcgctttaaaccgccattccctgcttcgttcggcctgtacggcaaaccgaccaccattaacaataccgaaacgttctcctccgtccccttcattatccgtgacggcggacaggcatttgccgataaaggtattccgaatgcgggcggtaccaaattgttctgtatttccggccacgtcgaacgtccgggcaactatgaagtgccgttgggtacgccgtttgccgaagtcctgaaaatggcgggcggtatgcgcggcggtaaaaaacttaaagccgttattcccggcggttcgtccgcgcccgtattgcctgccgacatcatgatgcagaccaatatggactatgactcgatttccaaagtaggctcgatgctgggttctggcgcgattatcgtgatggacgaagatgtgtgcatggtcaaagcccttgagcgtttgagctacttctactacgacgagtcttgcggccaatgtaccccctgccgcgaaggtaccggctggctttaccgcatcgtccaccgcatcgtagaaggcaaaggtaaaatggaagatttggatttgctggattccgtcggcaaccaaatggcaggccgcaccatctgcgccctcgccgatgccgccgtcttccccgtccgcagctttaccaagcatttccgtgatgagtttgtgcattacatcgaacacggcggaccgatgaaaccgaataagtggtgctaa

SEQ ID NO: 71719 - DNA, 183 bp, Neisseria meningitidis; identical to SEQ ID NO: 54662

SEQ ID NO: 71720 - DNA, 843 bp, Neisseria meningitidis; identical to SEQ ID NO: 55873

SEQ ID NO: 71721 - DNA, 1266 bp, Neisseria meningitidis
atgtctgaagcccttgcaaaagaaaccctcaatccgtttgaaatcgcgcgcaaacaggtcaaaaccgcctgcgaccggctgaaaaccgatccggccgtttatgaaatcctgaagagtccgacccgcgtgttggaagtcaatttccccgtcaaactcgacgacgacacggtcaaaaccttcacgggctaccgttcgcaacacaacaacgccgtcggcccctataaaggcggcgtgcgcttccatcccggagtgaatctggacgaagtcaaagccctgtcgatttggatgaccatcaaatgctgcgtagcgggcattccttacggcggcggcaaaggcggcgttaccttggatccgcgcgattattccgaggcggaactggaacgcatcgcccgcgcttattccgaagccatttctccgctgatcggcgaaaaaatcgatattcccgcccccgatgtgaacaccaacggcaaaatcatgtcttggatggttgatgcctatgaaaacgtggtgaaacattctgcaccgggcgtatttaccggtaaaccggttgagttcggcggctctttggcgcgtaccgaggctaccggttacggcgtgaacctcgccgccgtccaagccttggaaaaactgggcaaggacgtgaaaggcgcgacttacgccatccaaggcttcggtaatgtcggttaccacacaggttattacgcgcatcaatccggcgcgaaagttgttgcggtttctactgttgacgttgccatttacaacgaaaacggtttggatatggaagccctgttcaaagagttccaagaaaaaggcttcatcaccaacgaagccggttacggcaaggaaattaccaacgccgaacttttggctttggatgtggacgtactcgccccttgcgcgctggaaaatcaactgacttctgaaaacgccggtaaagtccgcgcgaaaatcgtggtcgaaggcgcgaacggcccgactacgcccgaagccgacgttatcctgcgtcaaaacggcgtattggtcgtgcctgatattctggcgaactgtggcggcgtggtcgtttcctatttcgagtgggtgcaaaacctgcaaggctattattgggagtttgacgaagttcaagagaaagaaaccgtcgtcctgcgccgagcgttccgcgatatttggaacttggctcaagaatacgatgtcgatttgcgaaccgcgtcttatatgatgagtatccgccgtgttgaaaaagcgatgaaactgcgcggttggtattga

SEQ ID NO: 71722 - DNA, 723 bp, Neisseria meningitidis
gtgtggcaggcgttgctgtacgctttggttgtgcttttgatgtggctggtcggtgcggcgcggcggattgccgatacgcgcacgtttacgcggatttataccgaaatcgccgtgccggtcgtgttggaacagcggcagcgacaagtcccgcattcggcggtaactgcgcgggttgccctgtcgcgtgagtttgtcagcttttttgaagaacacctgccgattgccgcgacatccgtcgtatccatattcggcgcgtgcatcatgctgctggtgctggaattttgggtcggcgtgtcggcggtgggcatacttgcgttgtttttatggcttttgccacgttttgccgccatcagcgaaaacctgtatttccgcctgaagaacagcttggaatgcgacaaccactttatccgaaaaggagaccggcggcagctggaccgccattacggactggttgcgcgcctgcgtgtgctgatttccaaccgcgaagccttcggctatctctgcgtcggcgcggcgatgggtattttgttcggctttgcttttgtgatgatgacgctcaaaggctacagcagcgcggggcatgtctattcggtcggcacttatctgtggatgtttgccatgagtttggacgacgtgccgcgattggtcgaacaatattccaatttgaaagacatcggacaacggatagagtggtcggaacggaacatcaaagccggaacttga

SEQ ID NO: 71723 - DNA, 342 bp, Neisseria meningitidis
atgcccaaaatcaccgtacttccacacacgacattatgccccgaaggcgcggttatcgaagacgcgcccgaaggcaaaaccgtccttgacgtactgctcgaccacgacatcgaagtcgatcacgcctgcgaaaaatcctgcgcctgcaccacctgccacgtcatcatccgcaaaggtttcgacagtttggaagaaccgaccgaattggaagaagacctgctcgaccaggcttggggtttggaagccgattcgcgcctgagttgtcaggcggttgtcgccggcgaagatttgattgtggaaatccccaaatacaccatcaaccacgcgcgtgaagaacactga

SEQ ID NO: 71724 - DNA, 1050 bp, Neisseria meningitidis; identical to SEQ ID NO: 38313

SEQ ID NO: 71725 - DNA, 1920 bp, Neisseria meningitidis
  misc_feature 1897, 1898, 1899, 1900, 1901: 'n' is a, c, g or t
atgtctcaactggcaaacgcaatccgcttcctctcggccgatgccgttcaaaaagccaattccggccaccccggcgcgcctatgggtatggcggaaatggcggaaacattgtggacgaaattcctcaatcacaatcccgccaaccccaaattctacaaccgcgaccgcttcgtcctctccaacggccacgcgtctatgctgttgtacagcctgctgcacctgaccggctacaacctaagcattgaagacttgaaaaacttccgccaactgcacagcaaaacccccggccaccccgaatacggctacaccgacggcgtggaaaccacgaccggcccgttggggcaagggattgccaacgcggtgggtatggcattggcagaaaaaatccttgccgccgaatttaataaagacggtttgaacatcgtcgatcattacacctacgtcttcatgggcgacggctgcctgatggaaggcgtatcgcacgaagcctgctcactcgccggcactttaggcttgggcaaactgattgttttgtatgacgataacaatatttccattgatggtaaagtggacggctggtttaccgaaaacatcccgcaacgctttgaaagctacggctggcacgtcgttcctaacgtaaacggtcatgacaccgccgccattcaagccgccatcgaagccgcacgtgccgaaaccggcaaaccgtccatcatctgctgcaaaaccttaatcggcaaaggcagtgccaacaaagaaggcagccacaaaacccacggcgcacctttgggcgcggacgaaatcgaagccacgcgcaaacatttgggctggacttaccccgcctttgaaatcccgcaagaaatttacgatgcgtggaatgccaaagaacaaggcgcgaaactggaagccgactggaacgaactgttcgcgcaatatcaagccaaatatcctgccgaagccgcagaatttgtgcgccgtatggataaaaagctgccggacaatttcgatgaatacgttcagacggcattgaaagaagtgtgcgccaaagccgaaaccatcgctacccgcaaagccagccaaaacagcatcgaaatcttggcaaaagagttgcctgaattggtgggcggttcggccgacctgaccccgtccaacctgaccgactggtcaaacagcgtctccgttacccgcgacaaaggcggcaactacatccactacggcgtgcgcgagttcggtatgggtgcgattatgaacggtcttgccctgcacggcggcgtaaaaccctttggcgcgaccttcctgatgtttagcgaatacgaacgcaacgccttgcgcatggcggcactgatgaaaatcaaccctgtatttgtgttcacccacgattccatcggtttgggcgaagacggcccgacccaccagccgattgagcaaaccgccaccctgcgcctgattccgaacatggacgtatggcgtccgtgcgacaccgccgaatctctggtggcttgggcagaagccgtcaaagccgccgatcatccgtcctgcctgattttcagccgtcaaaacctgaaattccaagcgcgcagcgaacaacaactgaacgacatcaaacgcggcggctacatcatcagcgaagcccaaggcaacgcgcaagccgtcatcattgccaccggttccgaagtcgagctggctttggaagcgcaaaaagccctcgccgcgcaaaacatcgccgtacgcgtcgtttccatgccgtccaccaacgtattcgaccgccaagacgccgcctatcaagccaccgtcctgcccgaaggtctgccgcgcgttgccgtagaagccggacacgccgacggctggtacaaatacgtcggtctgaacggcgcagtcgtcggcatcaaccgcttcggcnnnnncacacacttaattaattaa

SEQ ID NO: 71726 - DNA, 1419 bp, Neisseria meningitidis
atgaatattcacaccctgctctccaaacaatggacgctgccgccattcctgccgaaacggctgctgctgtccctgctgatactgcttgcccccaatgcggtgttttgggttttggcactgctgaccgccaccgcccgcccgattgtcaatttggactatcttcccgccgcgctgctgatcgccctgccttggcgtttcgtcaaaattgccggcgtattggcgttttggctggcggttttgtttgacgggctgatgatggtgatccaactcttcccttttatggatctcatcggcgccatcaacctcgtccccttcatcctgaccgcccccgccccttatcagataatgaccgggctgttgctgctgtatatgctggcgatgccgtttgtgttgcagaaagccgccgccaaaaccgacttccggcacattgccgtctgcgccgccgttgtggcggcagccggctatttcaccggccatttgagttactacgaccgaggtcggatggccaatatcttcggcgcaaacaacttctactacgccaaaagtcaggcgatgctctacaccgtcagccagaatgccgactttattaccgccggcctggtcgatcccgtcttcctccccttgggcaatcaacagcgtgccgccacgcatctgaacgagccgaaatctcaaaaaatcctctttatcgtcgccgaatcttgggggctgccggccaatcccgaacttcaaaacgccacttttgccaaactgctggcgcaaaaagaccgtttttcggtttgggaaagcggcagttttccctttatcggcgcgacggtcgaaggcgaaatgcgcgaactgtgcgcctacggcggtttgcgcgggttcgcactgcgccgcgcgcccgacgaaaaatttgcccgctgcctccccaaccgtttgaaacaagaaggttacgccacctttgcgatgcacggcgcgggcagttcgctttatgaccgcttcagctggtatccgagggcgggctttcaagaaatcaaaaccgccgaaaacctgatcggtaaaaaaacctgcgccattttcggcggcgtgtgcgacagcgagctgttcggcgaagtgtcggcatttttcaaaaaacacagcaaaggattgttttactggatgacgctgaccagccacgccgactatcccgaatccgacattttcaaccacaggctcaaatgcaccgaatacggcctgcccgccgaaaccgacctctgccgcaacttcagcctgcacacccaattcttcgaccaactggcggatttgatccaacgccccgaaatgaaaggcacggaagtcatcatcgtcggcgaccatccgccgcccgtcggcaacctcaatgaaaccttccgctacctcaaacaggggcacgtcgcctggctgcacttcaaaatcaaataa

SEQ ID NO: 71727 - DNA, 2064 bp, Neisseria meningitidis
atgatgacccaaacccttttaatcgaactccttaccgaagaactcccgcccaaagctctgaataatctgggcaaccattttgccgccgccgttgccgaaggcttggaaaaagcgcaactggttgacggtgcagccgaatttacggcttatgcctcgccgcgccgtttggcggttcaagtcaaaaacgttaaagccgttcaggccgaccaaaaaatcgtgaaaaaaggccctgccgtggcgaatgccatgaaagacggtgcgccgaccaaggctttggaaggtttcgcacgcggtgcgggcgcgaaaatcgaagacttgaccatcgtccacgacggcaaacaggatgtgtacgcctacgaatacgtccaaaccggcaaaccgctgggcgaacttttggaagacattatcaatcaagccgttaagaaactgccgattccgaaagtgatgcgttggggcagcagcacgtttaccttcgtgcgccctgttcacgggctgattgtgctgcacggcggcgacatcgtaaacgtcagcgttttgggtctgcaaagcagcaatcaaaccttgggaccccgcttcttgtccaacggcgaaatcaccattgaaaacgccgacagctacgccgaacaaatgcgcgggcaaggcaaagtcgtcgcttcgtttgccgagcgcaaagccgcgattcagacggcattggaagggcaggcgcgccgtctgaacgcgaccgttgccgccgatgaagcattgctggacgaagtaaccgcgctggtcgaataccccgttgttttggaagccggttttgaggaacacttcctcgccgtgcctcaagaatgcttgattttgacgatgcagcaaaaccaaaaatacttcccgctgctcgaccaaaacggcaagctgatgaaccgcttcctgctggtctccaacctgcaaaccgcagacccgtcgcacatcatccaaggcaacgaacgcgttttgcgcgcgcgcctgtctgatgccgagttcttctacaaacaagaccaaaaggcgactttggaaagccgcctgcccaagctggcaaacgtggtttatcacaacaaaatcggttcgcaagccgaacgcatcgaacgcctgcaaagcattgccgcccacatcgctaaagcgttgggcgcagatgccgccgccgccgaacgcgccgcgcgtctggcaaaagccgacttggtaaccgaaatggtcggcgagttccctgaattgcaaggcaccatgggcaaatactatgcccgtttggacggcgaaaccgaagaaatcgccgaagccatcgagcaacactaccaaccgcgtttcgccggcgacaatctgccgaatggcaaagttgccaccgccgtggcactggcggacaaactagaaaccttggtcggcatttggggcattggtctgattccgaccggcgacaaagacccctacgccctgcgccgcgccgccttgggtattttgcggatgctgatgcagtacggtttggacgtgaacgaactgattcagacggcattcgacagcttccccaaaggtttgctcaacgaaaaaacgccgtctgaaaccgccgactttatgcaggcgcgccttgccgtgttgctgcaaaacgattatccgcaagacatcgttgccgccgtattggcgaaacagccgcgccgtttggacgacgtagtggcgaaactgcaagccgttgccgcgttcaaacaactgcccgaagccgccgcgctcgccgccgccaacaaacgcgtgcaaaatctgctgaaaaaagccgatgccgagttgggcgcggttaacgaaagcctgctgcaacaggacgaagaaaaagccctctttgccgccgcgcaaggcttgcagccgaaaatcgccgccgccgtcgccgaaggcaatttccaaaccgccttgtccgaactggcttccgtcaagccgcaagtcgatgccttctttgacggcgtgatggtgatggcggaagatgccgccgtaaaacaaaaccgtttgaacctgttgaaccgtttggcagagcagatgaacgcggtagccgacatcgcgcttttgggcgagtaa

SEQ ID NO: 71728 - DNA, 309 bp, Neisseria meningitidis
  misc_feature 6, 7, 8, 9, 10: 'n' is a, c, g or t
gtgtgnnnnncgcctgccaaactgcctgacgaacaggatttgcgggcggtattggcatacaatatgcggcttttccgcgtgaacaagggttggtcgcaagaagaattggcgcggcaatgcggtttggacaggacttatgtgtcggcagtcgagcgcaaacgctggaacatcgccctgtcgaatatcgaaaaaatggcggcggctttgggcgtggcggcgtatcagttgctgctgccgccgcaggaacggttgaagctgatgaccaattccgccgatacccgacaaatgccgtctgaaagcggtatttga

SEQ ID NO: 71729 - DNA, 2160 bp, Neisseria meningitidis
atgaacaatccattggtaaatcaggctgctatggtgctgccggtgtttttgttgagtgcttgtctgggcggcggcggcggcagcttcgatcttgattctgtcgataccgaagccccgcgtcccgcgccaaagtatcaagatgtttcttccgaaaaaccgcaagcccaaaaagaccaaggcggatacggttttgcaatgcgcttcaagcggcggaattggcatccgcaggcaaatcctaaagaagatgagataaaactttctgaaaatgattgggaggcgacgggattaccaagtgaccctaaaaacttacccgagcgacagaaatcggttattgaaaaagtagaaacagatagcgacagcaatatttattcttccccctatctcacgcaatcaaaccatcaaaatggcagcattaatggcggtgcaaacctaccaaaaaacgaagtaacaaattataaagatttcaaatatgtttattccggttggttttataaacatgctaaacgaaaaattaattcatctagtcaaaataaaattgcacaacaaggcgacgacggctatatcttttatcatggcaaagaaccttcccgacaacttcccgcttctggaacagttacctataaaggtgtgtggcattttgcgaccgatacaaaaaagggtcaaaaatttcgtgaaattatccaaccttcaaaaaatcaaggcgacaggtatagcggattttcgggtgatgacggcgaagaatattccaataaaaatgaagcgactttacaaaacggtcaagagggttatggttttacctcgaatttagaagtggatttcgacaataagaaattgacgggcaaactgatacgcaatgataaagttacaaacgctactactagcgacaaacataccacgcaatattacagccttgaggctcaagtaacaggcaaccgtttcaacggcaaggcaacggcaaccgacaaaccaaaagagaatgaaaccaaacaacatccctttgtttccgactcgtcttctttgagcggtggctttttcggcccgaagggtgaggaattgggtttccgctttttgagcgacgataaaaaagttgccgttgtcggcagcgcgaaaaccaaagacaaacccgcaaatggcaatactgcggaggcttcaggcggcacagatgcggcagcatcgggcggtacggcaggcacgccgtctgaaagcactaagctgaccacggttttggatgcggtcgagctgaaatcgggcggtaaggaagtcaaaaatctcgacaacttcagcaatgccgcccaactggttgtggacggcattatgattccgctcctgcccaaggattccgaaagcgggggcaatcaggcagataaaagtaaaaacggcgaaacagcctttacccgcaaatttgaccacacgccgaaaagcgatgaaaaagacacccaagcaggtacgccgacgaatggggcgcaaaccgcttcaaatacggcaggtgataccaatggcaaaacaaaaacctatgaagttgaagtctgctgttccaacctcaattatctgaaatacggaatgttgacgcgtaaaaacagcaagtccgcgatgcaggcaggaggaaacagtagtcaagctgatgctaaaacggaacaagttgaacaaagtatgttcctccaaggcgagcgcaccgatgaaaaagagattccaaaagagcaacaagacatcgtttatcgggggtcttggtacgggcatattgccaacggcacaagctggagcggcaatgcttccgataaagagggcggcaacagggcggaatttactgtgaattttggcgataaaaaaattaccggcacgttaaccgctgaaaacaggcaggcggcaacctttactattgagggcgatattgagggcaacggtttttccggtacggcgaaaactgctgaattaggttttgatctcgatcaaagcgataacacccgcacgcctaaggcatatatcacagatgccaaggtaaagggcggtttttacgggcccaaagccgaagagttgggcggatggtttgcctatccgagcgataaacaaacgaaaaatgcaccagatgcatccggcaatggaaattcagcaagcagtgcaactgtcgtattcggtgcgaaacgccaacagcctgtgcgataa

SEQ ID NO: 71730 - DNA, 840 bp, Neisseria meningitidis
ttgcaaaggtctcaggtcgccctcgtcgtgacggaaagtaccggcggtctcgaaatccccgccgccaaagccatccgccgagcaggcatagccgtgattatcgccaacccgcgtcagacgcatcagtttgcccaatcgcagccgctgaccaaaaccgacgccaaagatgccaaaatgcccgccttcttcgcacagatgacggcacagaaagaagattcgcaaaccatgccctaccaaccgcccaccgaagcggaagaagtgttggaagccttggttaaccgccgcaaccaaccggcggatatgcggactgccgagaaaaaccgtctgcatcaggttcacgaaacgcaagtcggaagcgtcaaacaactgattgcccattttgaccggctgattgacgaattggacaaacaaatcgacgaccacacccacacgcattttgacggcaaagcccaagtggcagaacaaatcaaaggcatcggttcgataacgacggctacgctgatggcgatgctgcctgagttggggcggctgtcgcacaaacggatagcgagtttggtcggcattgccccgcacccgagggagagcggggaaaccaaattcaaaagccgctgctttggcggaaggtctgcggtgcttaaggcactgtatatggctaccgtggcagcgacacgttttgaaccgcttattcgggatttctaccaacgcctgccgtccgagggtaagccgtataaggttgccgttacggcatgtatgcgtaaactgctgacgatatcgaatgcccggatgcgtgattattttgccgaaaacgataccgccgaaaacggtatccggacggcttga

SEQ ID NO: 71731 - DNA, 1035 bp, Neisseria meningitidis
atgccgaattgtttcaaatttcataccgttatcgaacggcattggcaaaaaccttatccggttttgtcttttctgcttaagccgctctccgggctgtttgccaaaattgcggcaaaacggcggacggattttttatcgggaaaacggcaaagcgaaaagctgcccgtgcctgtggtcgtggtcggcaacatccacgcgggcgggacggggaaaacgccgattgccgccgcgctggtgtcgggtttgcaggaaaaaggtgtcaaggtcggcatcatcagccgaggctacgggcgcaagagcaaggcggttcatgtattgaatgccgcgagccgtgcggaagatgcgggcgacgagcctttgctgctgttcagcaaaaccggtgcgccgacggcggtgggcagcagccgtgcagaggcaggcagggcgttgctggcggcgcatcccgacatcggactgattgtggcggacgacggtttgcagcattacgccctgcggcgagatgtggaaatcgcggtgtttccggcggcggatacggggcgcacggatttggatttgctgcccaacggcaatttgcgcgaacctttgtcgcggctggattcggtggatgcggtcgtcgtcagcggcggcaaggcggatgcgctgtttaggccgtctgaaaatatgtttcacagccgtatcgaagcgggacgaatttaccgtttgaacaatccgtccgaaatactggacacaggccgtctgaaaaatcaaaccgtcgtcgccgtggcaggtattgccaagccggcgcgttttttcgattcgttgcggaatatgggcattaccgtgaagcgaaccgtcgcgctgcccgaccacgccgacatttcggcggcagatttgcccgatgcggacgcggtcattattacggagaaagatgcggtcaaattttcagacggcatttgcaccgataatgtttgggtgttgcccgtttgtgcgataatcgaacctgatttggcggcgtttgtgttggagcggttggaagatgtaccgaaggccgtctga

SEQ ID NO: 71732 - DNA, 210 bp, Neisseria meningitidis; identical to SEQ ID NO: 43717

SEQ ID NO: 71733 - DNA, 1929 bp, Neisseria meningitidis
atggcaaaagtaatcggtatcgacttaggtacaaccaactcttgtttggccatttccgaaaacggtcaaaccaaagttatcgaaaacgcagaaggcgcacgcaccacgccgtccgttatcgcttatttggacggcggcgaaatcctcgtcggcgcgcctgccaaacgccaagccgtaaccaacgctaaaaacactatttacgccgccaaacgtttgatcggccacaaatttgaagacaaagaagtccaacgcgacatcgaatctatgccttttgaaatcatcaaagccaacaacggcgacgcatgggtgaaagcgcaaggcaaagagctgtctcctcctcaaatttccgcagaagtcctgcgtaaaatgaaagaagccgctgaagcttacttgggcgagaaagtcaccgaagccgtgattaccgttcctgcctacttcaacgacagccaacgtcaagcaactaaagacgcaggccgcatcgcaggtttggaagtaaaacgtatcatcaacgaaccaaccgcagccgctttggcattcgggatggacaaaggcgacaacaaagaccgcaaagtagccgtatatgacttgggtggcggtaccttcgatatctccatcatcgaaattgccaacctcgacggcgacaaacaattcgaagtattggcaaccaacggcgatactttcttgggcggtgaagacttcgaccaacgcttgatcgactacatcattgacgagttcaaaaaagaacaaggcattgatttgaaacaagacgtaatggctctgcaacgtctgaaagaagctgctgagaaagccaaaatcgaattgtccagcggccagcaaaccgaaatcaacctgccgtacatcactatggacgcaaccggtccgaaacacttggcaatgaaaattacccgtgccaaattcgaaagcctggttgaagacttgattgcccgctctatcgaaccttgcaaaattgcattgaaagatgccggcttgagcaccggcgacatcgacgacgtgattttggtcggcggtcagtcccgtatgccgaaagtacaagaagccgttaaagacttcttcggcaaagagcctcgtaaagacgtgaaccctgatgaagccgttgccgtaggcgcagcgattcaaggcgaagtattgagcggtggccgcagcgacgtattgctgctggacgtaacccctctgtccttgggtatcgaaaccatgggcggcgtgatgaccaagctgattcaaaagaacacgaccattccgactaaagcgtctcaagtgttctctactgccgaagacaaccaaagcgcagtaaccatccatgtactgcaaggcgaacgcgaacgcgcttctgccaacaaatctttgggtcagttcaacttgggcgacatcgcacccgcaccgcgcggtatgccgcaaatcgaagtaaccttcgacatcgacgccaacggcatcctgcacgtttccgccaaagacaaaggcaccggtaaagcggccaacatcaccatccaaggttcttcaggcttgagcgaagaagaaatcgaacgcatggtgaaagatgccgaagccaatgctgaggaagataaaaagctgactgaattggtcgcttcccgcaaccaagccgaagccctgattcactccgtgaaaaaatctttggccgactacggcgacaaactcgacgctgccgagaaagaaaaaatcgaagccgcgctgaaagaagccgaagaagccgtgaaaggcgacgacaaaaccgccatcgatgccaaagccgaagcactgggcacagccagccaaaaactgggggaaatggtttacgctcaagcacaagctgaagcccaagcaggcgaaagcgaacaagccaatgcttctgcaaagaaagacgatgatgtcgtagatgccgactttgaagaagtaaaagacgacaaaaaataa

SEQ ID NO: 71734 - DNA, 2001 bp, Neisseria meningitidis
atgctgccaacccaacccaacccaacccaacccaacccaacccaacccaacccaacccaacccaacccaacccaacccaacccaacccaacccaacccaagccctgatctaagcgacacagccggggcgaacactgaggcaatctacacttcagacggcattaccgccaactctacccaactcgaacagctcaaaaaactgtttcccgcctgttttgacgcagacggaaatttccttatcgacagattacaagccgaaattgcgccacagaccgacatcggacgcgaattttacgaaatgaactggctgggcaaatcatatgcccgcctgcttcgcaacctgccgcccgaaaccctgataagtgaagacaagacgcacaacgccaaacccgaaaatgcaggcagccaaaacctactgattcgtggcgacaatctagaagtgttgaaacacttaaaaaacgcctacacaaacagcgtgaagatgatttacatcgacccgccctacaacaccggatcagacggctttgtctatcaggacgaccgcaaattcacaccagccgaacttgcctgcttagccaatattgacgaagacgaagccgcgcggattttagatttcaccgacaaaggctcaaactcgcacagtgcatggttgacctttatgtatccgcgcctgtatatcgcccgcgaactgttaaaggacgacggcgtgatttttatctcgattgacgataacgaagcggcgcaattgaagttgctttgcgatgaagtgtttggggaagggaattttgttgctaatgtgatttggcaaaagaaatatagcccacaaaacgatgcaaaatggttttcaaatatgcacgactacattttatgcgttgcaaaaaataaagatatttggcgaccaaacttattagagagaacagaagaacaaaatgcaagatattccaatcctgataatgatgaacgtggaaactggaaagcaactgatttttctgtgaaaacatattcagaaaattatgactatccaattaccacgccatcaggacgaattgttaatccgccacctagtagaagttggagaacttcaaaagaaaattttgaaaaattattagcagataacagagtttggtttggaataaatggtaataatgttccctcaattaaaaaattcttaacagaagtaaaacaaggaataacaccttcaacaatattatttagagaaaatgttggtgataatcaggaagctgcaaaaaatattagagacttatttgacattccaccttttgaaactccaaaacctgttaggttattaaattatcttattaaacttagttcaaattcggacgatatcgtgatggacttcttcgcaggcagcggcacgaccgcacacgccgtgatgcagcttaacgccgaagaacaaaacggcagccgccgctatatctgcgtgcaactgcctgaaaaaaccggtgaaaaatccgaagcccgtaaagcaggctacccgaccatcttcgacatcaccaaagcccgcatagaaaaagccgccgccaaaatccgcgccgaacatcccgattacacgggcgatttgggcttcaaaatctttcaaacggcagacaatttcagacagcatccggacaaggatttttcgcccgagcaaccggatttgccgcttaacgatgaattaagcgaagaacagctgcaaacgcttctgaccacctggacgctgtatgacggagcggcactgaccacgccggttgagcctgtgcggttgggcagttatacggcgtatttgtgcgaaaaacggctgtatctgatgaatgccggttttacttccgccgatttgttggcgtttatccgcaagctggacgacgatgcggctttcaatcccaaccgcgtgattgtattcggcagcaatatggcaagcgcaatgcagcacgaacttgaccaggcggtacgcggttataccaataaaaaagagattgagttaaacgtgattatcagggtttga

SEQ ID NO: 71735 - DNA, 2190 bp, Neisseria meningitidis
atgatctaccaccgcatcgccgtaaacgtgccgctttcagacggccttttgacttattcccattccgatccgcttcctccgggaacgcgggtgcttgtgcctttccgcaataaaaccgtggtcgggatggtgtgggaaacggatattgcgccggatatggatacggcgcggattttgagtattcagacgacctttttagacgagccgccgttgcctgaaagctggcgtgatttgctctcgtttacgtcgcgttattaccactatccgacggggcaggcggtgtttgccgcgctgccgcagggtttgaaggaaacgcgcgcggtggaaatgccgcagccgccgttgttttacgcgctgaacgaagcgggcagggcgcaaacgccgccgctggcgcggttcaacaaaaaagcggctctgtgggacgcactgctgtcgggcgggatgacgatggcggcgttgaagcaggtaaacgcgcaggcggcgaaattgattgaggattgggctgaacaaggctggattgaaacgacggaagcggcgaagcccgttttaaggtcgtgtaatgggcaggcttcgcactctgaatttgtattaaatgctgaccagcagaaggcttccgatgccattcagacggcattgggacgcttccagccgtttctgctgtacggcatcaccggcagcggcaagaccgaggtgtattttgatgcgatggcgaaagtgttggctcaggggcggcaggtgttgtttctgttgcccgaaatcaacctcacgccgcagcttttgaagcgggtggaaaaccgttttgccgacgtgccgaccgccgtgttgcacagtcagatggcggcaggcaagcgcacgcaggattatctgcgcgcgatgttagggcaggcgaagctggtgatcggcacgcggctggcagtgttcacgccgatggatgatgtcgggctgattgtggtcgatgaggaacacgacggctcgttcaaacaagacaacgaattgcgctatcatgcccgcgatttggcggtgtggcgggcgaagcagggcggctgccccgtcgtgttgggcagtgccacgcccagcttggagagctggcacaaggcgcaaagtggcgcgtaccgcctgctgcaactgaccgaacgcgcccataccgccgcgcaactgccgcaagtggacattctcaacgtaggccgtctgaaactcgacaacggcttctcgccgcaagccttgcagcttttgaaacagaactttgaagcaggcggtatgtcgctggtgtaccttaaccggcgcggcttcgcgcccgcgctgttttgcggcgactgcggtcataccttcggctgcccgaactgctccgccaaaatggtgctgcaccaacgcgcccgccaactgcgctgccaccactgcgaccaccgcgaacccatcccgtacaaatgccccgactgcggcaaccaagacctgaccgccgtcggccacggcacgcagcgcgtcgaagaaaccctgcgcgccttcctgcccaaggcagccgtcgtccgcgtcgatagggacagtacggcgcacaaaaacgactgggcggatttgtaccgccgcatcgccgacaacgaaatcgatattctggtcggcacgcagatgctcgccaaaggtcatgatttcgcgcggctcaacctcgttatcgtattgaacgccgacggcagcctgtacagcgcggatttccgcgcgccggaaaggctgtttgccgagctgatgcaggtgtccggcagggcggggcgcgccgacaaacccggcaaggtgctgatacagacccaactgcccgaacatcccgtcttcgccgccgtcaaagcgcaggattatgccgtgtttgccgaaaatgaattgaacgagcggcaaatgttcgcgatgccgcccttcggtttccagaccgccgtccgcgccgatgcgccgcgtgttgccgatgcgatggaatttctcaatgccgccaaagaaaccctcgccccgctgttgcccgaaagcgtttcccagtttggcgccgcccctatgctgatggtgcgccttgctgaacgcgaacgcgcgcaaatcttcctcgaatcggtatcccgacaggatttgcaccgcgccgtgagtttgtgggtgcaggtgttgcagcaaaaccgcgacagcaaaatcagatggtcggtggatgtcgatccgcaggaggcttga

SEQ ID NO: 71736 - DNA, 471 bp, Neisseria meningitidis; identical to SEQ ID NO: 42963

SEQ ID NO: 71737 - DNA, 960 bp, Neisseria meningitidis
atgtccaaaaaaaccaaacaagaactggaaaacaacaaactcagcaaacgcctgcgccacgccgtcggcgacgcgattaacgatttcaacatgatcgagccgggcgacaaaatcatggtctgcctctccggcggaaaagacagctatgccctcttggacatcctgcgccagctccaagccagcgcgccgattgatttccaactggttgccgtcaatctcgaccaaaagcagccgggcttccccgaagaagtattaccgacctatctcgaaagcatcggcgttccctacaaaattgttgaagaagacacctactccaccgtcaaacgcgtattagacgaaggcaaaacgacttgttcgctgtgcagccgcctgcgccgcggcatcctctaccgcaccgcaaaagaattgggctgcaccaaaatcgccttaggacaccaccgtgacgacatccttgccaccatgtttttaaatatgttttacggtggaaaactcaaagccatgccgcccaagctggtgagcgacaacggcgaacacatcgtcatccgccccttggcttatgtgaaagaaaaagacttaatcaaatacgccgaattgaaacagttcccgattatcccgtgcaacctttgcggctcgcaacccaacctgcaacgccaagtcatcggcgatatgctgcgcgattgggacaaacgcttccccggccgtatcgaatcgatgttctccgccctgcaaaacgtcgtcccttcccaccttgccgataccgaactctttgactttgtcggattagaacgcggtcaaagcctgaaacacggcggcgatttggcgtttgacagcgaaaaaatgcccgaacgtttttcagacggcagcgaagaagatgagagcgaaatcaaaatcgagccgcaaaaagccgaacgcaaagtcatcaacattctggctaacaagccgaaaacctgcggcgcgtaa

SEQ ID NO: 71738 - DNA, 852 bp, Neisseria meningitidis
atggcacgacacgtttggcaggcaggacggtttgaaatcggtttggacaaaccgaaaatcatgggtatcgtgaatctcacgcccgattctttttccgacggcggcgcgtattctcaaaacgcccaaaccgctttggcgcatgccgaacggcttttgaaagagggtgcggacattctcgacatcggcggcgaatcgacgcggccgtgcgcggattatgtttcgcctgaagaagaatgggcgcgggttgagcctgtattggcagaagtggcggggtggggcgttcccgtcagtttggacacgcgccgcacggtgattatggaaaaagcgttggcactcggtggcatcgatattattaacgatgtggcggcgttgaccgacgaaggtgcggtcgaattgctggcgcgccagacggacacgggcatttgcctgatgcacatgcggggtttgcctgaaaacatgcagattaatccgaaatatcaggatgttgtcggtgaagtggcgcggtatttgaaagcgcgggcggcggaatgcatcgcggcaggcatcgcaccgcaacgcatcacgctcgatccgggtttcggcttcggcaaaaccctgcaacacaatatcgcgctgatgaggcatttgcccgaattgatggcggaaacaggctttccgctgctgatcggcgtatcgcgcaaacgcatggtaggcgaactgacgggcgaaaccgacgcggcggcgcgcgtacacggcagcgtggcggcggctgtggcggctgtggcgcgcggcgcgcaaattgtgcgggtgcatgacgtgaaggcgacggcggacgcgttgaaggtgtgggaagcgttgggcatcaatctgtaa

SEQ ID NO: 71739 - DNA, 516 bp, Neisseria meningitidis; identical to SEQ ID NO: 54969

SEQ ID NO: 71740 - DNA, 1410 bp, Neisseria meningitidis; identical to SEQ ID NO: 55247

SEQ ID NO: 71741 - DNA, 1044 bp, Neisseria meningitidis; identical to SEQ ID NO: 38337

SEQ ID NO: 71742 - DNA, 582 bp, Neisseria meningitidis
atgtccgcacgtttccaagtggcggcggaaggacgggacaaaaatgccgtcaatgccgagtttgttaaaaaattcaacagttttaacagaaaattgaaaaacggcagctttaaaaccgaattggtatcgcgcagtgcgatgccgcgctatcaatataccaacggcagacgcattcaaacaggctgggaggagcgtgcggaatttaaggtcgaaggtagggattttgatgcgttgaaccgttttattgctgatgttcagacggatgcttcgcttgaatataccgatttcagcgtgtcgcgtgaacgccgaaacgaggtcatcgatcaggtcagcaaggatgctattttgcgttttaagacgcgtgccgaaaaactggcgggcattttgggtgcgtccggttataaaatcgtcaaattaaatttgggacacatcggcagccatatcgcgggagggggagctgctcaggcaaaaatgcttcgtgccatgccgatggcggcaagcgtcaatatggagggtgcggattctgccgcgcagggtgtggaggaaatcagcatcagcgtcaatgggacggttcagttctaa

SEQ ID NO: 71743 - DNA, 510 bp, Neisseria meningitidis; identical to SEQ ID NO: 36289

SEQ ID NO: 71744 - DNA, 183 bp, Neisseria meningitidis
atggaaagtttggtgcaaagacgaatttgttataaagcggttggcagtttctcaagcgggcgcgatgttttaaaatatagtggattaaatttaaatcaggataaggcgacgaagccgcagacagtacaaatagtacggcaaggcgaggcaacgccgtactggtttaaatttaatccactataa

SEQ ID NO: 71745 - DNA, 495 bp, Neisseria meningitidis; identical to SEQ ID NO: 54206

SEQ ID NO: 71746 - DNA, 756 bp, Neisseria meningitidis; identical to SEQ ID NO: 61845

SEQ ID NO: 71747 - DNA, 1059 bp, Neisseria meningitidis; identical to SEQ ID NO: 55416

SEQ ID NO: 71748 - DNA, 231 bp, Neisseria meningitidis; identical to SEQ ID NO: 70704

SEQ ID NO: 71749 - DNA, 594 bp, Neisseria meningitidis; identical to SEQ ID NO: 42358

SEQ ID NO: 71750 - DNA, 780 bp, Neisseria meningitidis; identical to SEQ ID NO: 54254

SEQ ID NO: 71751 - DNA, 1050 bp, Neisseria meningitidis; identical to SEQ ID NO: 54699

SEQ ID NO: 71752 - DNA, 651 bp, Neisseria meningitidis; identical to SEQ ID NO: 39609

SEQ ID NO: 71753 - DNA, 924 bp, Neisseria meningitidis
atgccgtccgaacacccgttttcagacggcatttccacacccaaccccaaagaaaccatgaacgacaccgcccaaattaccgccagctacggccgccgctacattgtccgcacgcccgacggcacaacctacgaagccagcacccgcaaaaaacgcgtcgatttcgcctgcggcgaccgcgtccgcatcagccccgtcaacgccgaacaagttgtgattgaagattttttaccgcgccaaagcctgctctaccgccaagacgcgtggaaaaccaaactcatcgccgccaacgttacccaactcctcatcgtaaccgccgccgtcccgagtccgagcatgcggctgctacaacgcgccctgcttgccgccgaagccgccggcatccgcgccgtcatcgtcctgaacaaagccgacctgcccgaaaccgccctttggcgcgaaaaactcaaattctacgaaacgctgggttatcccgtcatcgaaacccgcgcactggaaaacgccggcagcctgcgccccgccctgcaagggcacagcaacatcctgctcgggcagagcggtatgggcaaatccaccctgaccaacgcccttttgggcagccaaaccgcccgcaccggcgacatttccgccgcactcgactcgggaaaacacaccaccacccacgcccggctttatgatttgaacggcgaaacccaactcatcgactccccgggtttgcaagaatttggtttacaccacctccaagccgccgatttgccgcgctatttccccgatttccgccaccttgtcgggcaatgccgcttccacaactgcacccaccgcgccgaacccggctgcgccttcaaagccgccgcgcaaaccggggcggcaagccccgaacgcctcgcctttttgcagggcatcaccgacgaactgcccgggtaa

SEQ ID NO: 71754 - DNA, 870 bp, Neisseria meningitidis; identical to SEQ ID NO: 38859

SEQ ID NO: 71755 - DNA, 1458 bp, Neisseria meningitidis
atgtcccggcatcccgcccccaccggagaaaaaacattcttcggccaccccttccagctttccaccctcttccatatcgaattgtgggaacgtttttcattttacggaatgcagggcatcctgctgatttacctctactacaccgccgacaaaggcggcttgggcatagacaaaaccctcgccggcggcattgtcggcgcatacagcggcagcgtgtacctgtccaccattttgggggcgtggtttgccgaccgagtatggggtgcggaaaaaaccctcttcctctcgggcatcgtcgtgatgctcggacacatcgtccttgccgccgccccgggcctgtacggtcttttaatcgggctgatattcatcgcattgggcagcggcggtgtgaaatctacggccagttctatggtgggcgcattatacgaacaggacgaaatgcgcccgctgcgcgatgcgggattttccattttctacatcgccatcaacatcggcggcttcccgggcccgctgctgaccggcctgctgcaggaaaacatcggtttccattatggtttcggcgcggcggcggtcggtatggcattcggcttgtggcgttattccttgggacgtaaaaacctgccccaccccaccgtcccccatccgctttcaaaaggacagggcaaaactgcggccgccgtcggcatcaccctcatcgccgcacttgcaaccgccatcaaaaccgggcttgtcaacctcgacaatttctccggcatcctcttatctaccgtcatccttgccgtcattgcctatttcgcccgcctgctgaccaacccccgcgtcagttccgacaacaaacggcacatcatcgcctacatcccgcttttcctgaccatctgtatgttttgggccgtctggtttcagatttacaccgtggcaaccgtctatttcgacgaaaccgtcaaccgcaccatcggttcgtttaccgtgcccgtcgcctggaaagattccatgcaaagcctgtgggtcatcctgttttccggactgatggcggcaatgtggacaaaaatggggcgcaaacagcccaaaaccccgctgaaattcgctatggcggtatttgttaccggcgcgtcgtttttgggattcgtcccctttatttccgccggcacgccgatgcctattgcggttttcgcactgattgtccttgccatcacgataggcgaactgatgatttccccgattgcgctgtccatctccaccaaaatcgcaccgcctttattcaaaacccaaatggtcgcccttaatttccttgccttttcattaggcttcactttgggcggcgtattgtttgagaaaggctatcaggcgggcgacgaaatcggcttctaccggctgctgttctacatcggcgcaaccacaggcttcctgctgctcctgctcgtccccaaattgaacaaaatgctcgaaggcacagactaa

SEQ ID NO: 71756 - DNA, 1539 bp, Neisseria meningitidis
atgttccattccatcgaaaaatacagaacgcccgcccaagtccttttggggctgattgcattaaccttcgtcggcttcggggtcagcacggtatcccatccgggtgccgactacatcgtccaagtgggcgacgaaaaaatcagcgaccactccatcaacaacgctatgcaaaatgaacaggcggacggcggcagcccttcgcgcgacgcggtgttccaatccctgctgcaacgcgcctacctgaaacagggcgcgaagctgatgggcatttcggtttcttccgaacaaatcaagcagattatcgtggacgatcccaatttccacgacgcaaacggcaaattcgaccacgcgcttttaaaccgctacctttcccaacgtcatatgtctgaagaccagtttgtcgaagaaatccgcgatcagtttgccttgcagaatttggtaaacctcgtccaaaacggcgtattggtcggcgacgcgcaggcggaacagctgatcaggctgacgcaggtcaaccgcaccatccgttcgcacactttcaaccccgacgagttcatcgcccaagtcaaagtgtctgaagccgatttgcagaaattttataatgcgaacaaaaaagactatctgctgccgcaggcggtcaaattagaatatgtcgccttgaatctgaaggattttgcagacaaacagaccgtcagtgaaacggaagtgaaaaatgcgtttgaagagcgcgtggcgcgtttgccgacaaatgaagccaaaccttctttcgagcaggaaaaagccgccgtcgaaaacgaattgaaaatgaaaaaggcggttgccgacttcaataaggcaaaagaaaagctgggcgatgacgcgttcaaccatccttcctcgcttgccgaagccgccaaaaacagcggtttgaaagtcgaaacccaagaaacttggctgagcaggcaggatgcgcaaatgtccggtatgcccgaaaacctgatcaatgccgtattcagcgacgacgtattgaagaaaaaacacaattccgaagtgctgaccatcaacagcgaaaccgcgtgggtcgtccgcgccaaagaagtccgcgaagagaaaaccctgccgtttgccgaagccaaagacgcggtacgtcaggcttatatccgtaccgaagccgccaaacttgccgaaaacaaggcaaaagacgtgcttacccaactgaacggcggcaaggctgttgacgtgaaatggtcggaagtgtccgttttgggcgcacagcaggcaaggcagtccatgccgcccgaggcttatgcggaactgctgaaagcaaaaccggcaaacggcaaacccgcctacgtcaggctgatcggtctgccggcacccgtgattgtcgaagtacaggctgtaaccccgccggatgatatcgccgcacagcttccgcttgcaaaacaggctttggcgcaacagcagtctgccaatactttcgacttgttgatacgttatttcaacggcaaaatcaaacagaccaaaggagcgcaatcggtcgacaacggcgacggtcagtaa

SEQ ID NO: 71757 - DNA, 1206 bp, Neisseria meningitidis; identical to SEQ ID NO: 38565

SEQ ID NO: 71758 - DNA, 2310 bp, Neisseria meningitidis
atgcttgcacccgaattggaacagattttgcagcagctttaccgcgaggcgcgtaaggctcattatgaatttatcagcctcgagcatctgcttttggtactcatcgaagaagatgcctccgtccacaacgtcctcaagctctgcggcgcggatttgaaagtggtgtccgaacagctcgccgccagcgttgccgaaaacacccccctgattcccgaacaccttttagacacggtcgaaacccggcccacgctcggcttccaacgcgtgatgcaacgggcgatggtgcatacccagtctgccggaaaagccgcagtcgaaccgttggacgttttggtcgcgctgatgagcgaaaccgacagccacaccgtctatttcctcaagctgcaatcggttacgcgttttgaagttttgcgctgtattgcccacggctctcccgatgaagatgaagatgaagatgaagatgaagacgatggcaactattcttcagacggcatggacgacgataatggaaaccgcaccaaaccgggcaaaaaccctttatcggcgtacaccgtcaacctcaacgccgaagtcaaagccggccgtatcgaccctttgattggtcgcaaacacgaaatggaacggctggtgcaaatcctatgccgccgccgcaaaaacaatccgcttttggtcggcgaagcgggcgtgggcaaaaccgcgctggcggaaggtttggcacatcaaatcgtcaacggcggcattccagacgcgcttaaagatgccgaagtgtacgcgctggatatgggctcgctgttggcgggcacgaaataccgcggcgactttgaagcgcgggtcaaatccgtcttgaaacagctcgaaaaaatcccgcacgccattttgtttatcgacgaaatccacaccatcatcggcgcgggcagcaccagcggcggcaccatggacgcgtccaacctgctcaaacccgcgctggcaaaaggttcgctgcgctgcatcggcgcgaccacctacgacgaataccgcaccattttcgacaaagaccatgccttaagccgccgcttccaaaaaatcgacgtggtcgaacccaccgtttccgaaaccgttcaaatcctgcgcggcttgaaaccgatgtttgaagccttccaccaagtccgctacactcaaggcgcactcgaagccgccgccgaactctccgcacgctacatcaacgagcgtttcctgcccgacaaagccatcgacgtaatggatgaagcaggcgcggcgcaacggattctgcccaaatccaaacagaaaaaagtcatcggcaaagcacaaatcgaaaccgtcatcgccaaagtttcgcggattcccgaaaaaaccgtgtcgcacgacgacaaacaagtgctgcaattcctcggtcgcgatttgaaaaacatggtttacggtcaagaaaacgccatcgacgcgctggttgccgccgtcaaaatgtcgcgttccggccttgccctgcccgacaaaccgataggcagcttcctcttctccggcccgaccggcgtgggcaaaaccgaagccgccaaacagcttgcctactcgctgggcgtaccgctgcaacgctttgatatgtccgaatacatggaacgccatgccgtatcgcgcctcatcggcgcgccaccgggctacgtcggctttgaacaaggcggccttttgaccgaagccgtcaacaaacagccgcattgcgtattgctcttggacgaaatcgaaaaagcccaccccgacattttcaacgtcctcctgcaagtcatggacgcaggcaaactgaccgacaacaacggcaagagtgccgatttccgcaacgtcatcctgattatgaccaccaacgcaggcgcggaaagcctcagccgccccagcctcggctttaccgccaagcgcgaacgcggcgacgaaatgcaggcaatcaacaagctcttcacgcccgagttccgcaaccgcttggacgcgattatcccgtttgcacccttgtccgaacccatcatcgtcaaagtcgtggacaaattcctgctccagctcgaacaccagctcctcgacaaaaaagtcgaaaccgaattcacgccggcattgcacaaatatctggcggaaaaaggtttcgacccgcaaatgggcgcgcgcccgatgcaccgcctgattcaggaaaaaatccgcaaaccgctcgccgacgaactcctgttcggcaaactatccgacggcggcttcgtgcggatagactgggatgcggcaaaagaagaagccgtgttgaagtttaagaaaagcaaggtcaaaataaaaaccgcctccgcataa

SEQ ID NO: 71759 - DNA, 369 bp, Neisseria meningitidis; identical to SEQ ID NO: 54592

SEQ ID NO: 71760 - DNA, 384 bp, Neisseria meningitidis; identical to SEQ ID NO: 50847

SEQ ID NO: 71761 - DNA, 1266 bp, Neisseria meningitidis
atgagcaaaaaccaacccgcacaaccgaccaggcgcactctttttaaaaccgcgatcgcagccggagcagtcggcgcaatcggaggttatctcggcggcaaaaaacagggcgaaaccgccgaacgcaccgccgaaagccaacactcgccccaagcctatccctgctacggcgaacatcaggcaggcatcgttacgccgcagcaggcgttttcgattatgtgcgccttcgacgtaaccgcgcaaagtgccaagcagctggaaaacctgttccgcacgctgaccgcccgcatcgagtttctcacccaaggcggcgaataccaagacggcgacgacaaacttccgccagccggcagcggcattttgggcaaagccttcaaccccgacgggttgaccgttaccgtgggggtgggcagcagcctgtttgacggccggttcggactcaaagacaaaaaaccgattcatttgcaggaaatgcgcgacttctccaacgataagctgcaaaaaagctggtgcgacggcgatttgagcctgcaaatctgtgccttcacccccgaaacctgccaagccgccctgcgcgacatcatcaaacacaccgtccaaaccgccgttatccgttggagtatcgacgggtggcagcccaaatccgaacccggcgcgatggcggcgcgcaacctgttgggcttcagggacggcacgggcaaccccaaagtttccgatcccaaaactgccgacgaggttttgtggacgggtgtggccgccaacagcctcgacgaaccggagtgggcgaaaaacggcagctatcaggcagtccgccttatccgccactttgtcgagttttgggacaggacgccgcttcaagagcaaaccgacattttcgggcggcgcaaatacagcggtgcgccgatggacggcaaaaaagaagccgaccaaccggattttgccaaagaccccgagggtgatatcacgcccaaagacagccatatacgcctggcgaatccgcgcgatcccgaattcctcaaaaaacaccgcctcttccgccgcgcctacagctattcgcgcggactcgcctcaagcggtcagcttgatgtcgggctggtgttcgtctgctatcaggcaaaccttgccgacggttttatcttcgtgcaaaacctccttaacggcgaaccgctggaagaatacatcagccccttcggcggcggctatttcttcgtcttgcccggcgtggaaaaaggcggctttttggggcaagggctgctgggcgtataa

SEQ ID NO: 71762 - DNA, 822 bp, Neisseria meningitidis
atgatgcggatattttcgacaggaggaaaaatggatacgcaggcagttatcacacatattgtccgatggttggacgaatacgccgcacgggcaaatgcaaaagggtttgtcgtgggcgtttccggcggcatcgattccgccgtcgtctccgcactcgccgcccgcaccggccgccccacgctgcttctggatatgccgatacgccaacaccccgaccagcttgagcgggcaaggctgcacatccgcaatctgcaacggcaatatgccaatgtaagcgcgcaaacggtcgacctgaccgacaccttccagacctttgaacaaaccgtcggcattcatcagacggcatttgacaatcagccgctttccctcgccaacgccagaagccgcctgcgtatgctgaccctgtactactacgggcagatacacggactgctggttacggggacaggtaataagattgaagatttcggcgtgggattttttaccaaatacggcgacggcggcgtagacatcagcccgattgccgacctgaccaaaacgcaggtttaccggcttgccgaagcattgggcgtggacgaggcgattcaaaaagccccgccgaccgacggcctgtgggatacggaacgcaccgacgaagaacagatgggcgcaagctatcccgaactggagtgggcaatgggcgtgtacggcacgcgcaaacccgaagattttgaagggcggcagcgcgaagttctggaaatctatacgcggctgcaccgcgcgatgcagcacaaaatcaacccgattcccgtgtgccgcattccgcccgaattgttgggctga

SEQ ID NO: 71763 - DNA, 813 bp, Neisseria meningitidis
atggacaaaatcagagttgccgccgtgcagatggtgtcgggcgtgtcgccggaaaccaacgtcgctgccatgaaacgcctggtcgcacgggcggcggagcagggtgtggattgggtgctgctgcccgaatattgggtgctgatgggcgcaaacgataccgacaaactcgcgcttgccgagcctttgggcggcggacgctttcagacggcattgagcgaaacggcgaaagaatgcggcgtggtgctgttcggcggaaccgtgccgctgcaaagccccgaggcgggcaaggtcatgaatactttattggtgtacgggcgcgacggcaaacggacggggctgtaccacaaaatgcacctcttcggcttttccggtttgggcgaacgctatgccgaagccgataccatcagcgcagggcgggaagtgccgcacttgtcggcagaaggcgtgtcggtggcggcgggcatttgttacgatgtccgctttcccgaatttttccgccgccagctgccgtttgacgtattgatgctgcccgctgcgtttacgcacacgacgggcaaggcgcattgggagctgctgctgcgcgcgcgtgccgtcgaaaaccaatgttacgtcgtggcggcggcacagggcggtttgcacgaaaacggacggcgcacgttcggacacagcatgattgtcgatccgtggggcgacgtattggacgtattacccgaaggcgaaggcatcgttacggcagacatcgatgccaaccgcctgaacagtgtccgcaaccgcctgcccgccttgaaataccgggttttggatgccgtctga

SEQ ID NO: 71764 - DNA, 336 bp, Neisseria meningitidis; identical to SEQ ID NO: 45775

SEQ ID NO: 71765 - DNA, 1407 bp, Neisseria meningitidis
atgaaactgttccaacgcatcttcgccacattttgcgcggttatcgtctgtgcaatctttgtggcgagtttttctttctggctggtgcagaacacccttgccgaaaaccagttcaaccaacgccgcaccatcgaaaccactttgatgggcagcatcatttccgcattccgggcacgcggggacgcgggtgcgcgcgaaatcctgacggaatggaaagacagccccgtctcatcgggcgtgtacgttatacagggcgacgagaaaaaagatatcctgaaccggtatatcgacagctataccatcgaacgcgcccggcttttcgccgccggacacccgcattccaacctcgtccatatcgaatacgaccgcttcggcgaagaatacctgttcttcaccaaagactgggacaaactccaagcccgccgcctgcccagccccctgttgatccccggcctgccgctcgccccgatttggcacgaactcatcatattgtccttcatcatcgtcgtcggactgctgatggcgtacatcctcgccggcaacattgccaaacccatcagaatcttaggcaacggcatggacagggtggcaaacggagaacttgaaacccgcatctcccaacaggtcgacgaccgcgacgacgaattgtcccatcttgccatccaattcgacaaaatggcggaaaaactcgaaaaactcgttgccaaagaacgccacctgctccaccacgtttcccacgaaatgcgctccccgcttgcccgtatgcaggcaattgtcggactgattcaggcgcagccccaaaaacaggagcaatatctcaaacggctggaaggcgaactgacccgcatggatacgctggccggggaactgttaaccctgtcccgtctcgaaacttccaatatggctttggaaaaagaaagcctgaaactcctgcccttcctgggcaacctggtagaagacaatcaaagcattgcccagaaaaacggacaaacggttaccctgtctgccgacggaaaaatccccgaaaacacaaccatccttgccaacgaaagctacctgtaccgcgccttcgacaacgtcatccgcaacgccgtcaactacagtcccgaaggcagcaccatcctgatcaacatcggacaagaccacaaacactggataatcgacgttaccgacaacggccccggcgtggacgaaatgcagctcccgcacatcttcaccgctttctaccgtgcagactccagtgccaacaaacccggaacaggactggggcttgcattgacccaacatattattgaacagcactgcggcaaaatcatcgccgaaaacatcaaaccgaacggtctgcggatgcgcttcatcctacccaagaaaaaaaccggttccaaaacagaaaaaagtgcgaactga

SEQ ID NO: 71766 - DNA, 552 bp, Neisseria meningitidis
atgccgtctgaacgccgaccgtttcaaacggcatttttatcgaacaggaaaaccgtcggtaaacttgcagagcgtgtgcaatcccgatatgatggtttgcataaatttaaacatatatgttccgcagctatggcactgattaaagagccgttggacaaagcgaaacaaaggaacgaagaacttgaagcggcagaagaagcggcggcgcaggaggcattgggtcgggagcaggaagtcgaccgcgtatccgaatgggaagaacgctacaagctgtcgcgcagcgagttcgagcaattctggaaaggattgcctcaaaccgtacagaataagctgcaagcctcacagaaaacatggaaaagcgggatggataaaatctgtgccaacaatgcgaaagctgaaggtgaaacgccaaacggcataaaattcagcgaactggcatgcaaaacggcggaaaccgaagcacgcttggaagagctgcacaaccgtaaaaaagcccttatcgacgaaatggccagggaagcggacaagaaagaactgccaaagcggctctga

SEQ ID NO: 71767 - DNA, 942 bp, Neisseria meningitidis
atgaagggttttaccattattgaatttttggttgcgggcatgctcagtatgattgtcctgatggcggtcggatcgagttacttcacgtcccggaaattaaatgatgcggcaaacgagcgtcttgctattcaacaggatttgcggaatgcggcaacattaattgtccgcgatgcaagaatggcggggagcttcggttgtttcaatatgtctgagcataccgaaaaggatgttgttcccgatgtggcgcaaaaaaaccgtcttttttccttaaaagggagcagtgcaaataaacttatccccataacggaatctttaaatatcggatatccgggttttacccagcgccttaacgcattgattttccaatacggaatcgatgatgttaatgcaagcgccgatactaccgtcgtcagcagctgtgccaaaatagcaaaaccgggtaagaaaatatctaccttgcaagaagcaaagagtgcattacagattactaatgatgataaacaaaatggaaatatcacccgtcaaaggcatgtggtcaatgcctatgcggtcggcaggattgacgatgaggaaggtttgttccgcttccaattgaatgatgatgggcagtggggcaatcctcagttgttggttaaaaagattaataaaatggatatacggtatatctatcttctcgtggaaagtcctggtatacagcctaccaattctccccggtatatttacggttgccctgaagatgacgatgccggcaaagaggaaacattcagatatacggataaattcaacagcgcccaagatgctgttacgcccgccggggtggaggttttattgagtagcggtactgataccaagattgccgcttcttcagacaatcatatttatgcttaccgtatcgatgcgacaatacgcgggggaaatatatgcgcaaacagaacgctttga

SEQ ID NO: 71768 - DNA, 456 bp, Neisseria meningitidis; identical to SEQ ID NO: 63738

SEQ ID NO: 71769 - DNA, 1278 bp, Neisseria meningitidis
atgcaacagattaaatttattgacttattttccgggatgagcggtatcaggaaaggatttgaacaagcctgtcggaaacagtcggttgcttgcgaatgtgtttttacctcagaaatcaaaccggcagctttggaagtattgaagcaaaactaccctgatgaagtgccgtatggagatataacgaaaattgaaacgggagatattcccgattttgacatcttgttggcaggcttcccttgccaggctttttctttcgccggaaaaagattgggctttgaagatacgcggggaacgcttttctttgatgtggcaaggattttaaaggcaaaaaaaccaaaaggttttattttggaaaatgtggaaggattggtgacgcacgatagaaaagatccgacacaaaaaataggacgcaccctgaccgttattttggaaaccttggaaacattgggctactatgtttcttggaaagttttaaatgcaaaagatttcggcattccccaaaacaggaagcgcatttatctgacaggcagtttgaaatccaaacccgacttatcttttgaaacaaccctaagtccgaaattaaaaaatattttggaatcgggactgcctaccgaaagcagtcctttcatcaaaaaattgctaaagaaatttcccccgtccgaactgtacggaaaatcagtaaaggacaaacggggagggaaaaacaatatccacatccgcggttgggatattgaattgcacggcacagtaacgaaggaagagaagcaattattaaatatgcttctaaaagaacggaggaagaaaaaatgggcttcagaaatcggcatcgattggatggatgggatgcctttgacaaaagcgcaaatttcaactttctataaacaccccaatcttcaaaatattttggacagcctgacagataaaggctatttggttttggagcatccgaaacaaaaaattggcgggcgaagaatcaaagatgaatccctgcccaaaggctacaatattgtttcaggaaaaaaatcatttgaaatcaataaaatattagacccaaatgatgttgcgccaaccttagttgcaatggatatggagcaccttttcgtcgttgacaacggcggtttgcgcacacttaccggaaaagaaggtttacgcttattcggctatccggacgattattcgtttgatattcctaaaaaagacaaatacgatttattgggcaataccgttgccgttcctgtgattaaggcggtatctgaaaggcttctgcatactttataa

SEQ ID NO: 71770 - DNA, 1368 bp, Neisseria meningitidis
atgcctgaccttcataccgaattttcccgactcctgccggcagatgaaattgccgaactttctccgacgcttttaaaagaccagcgcaaccgctttacgtctgcaccagacatcattttgcagccgcgcagcgttgaaagcgtgcaaaccattatgcgtttttgttacgaacaccgcattccggttacgccgcaaggcggcaataccggtttgtgcggcgcggcagtatcggaaaacggcgtattgctgaacctttccaaactcaaccgcatccgcagcatcaatttgtcagacaactgcataaccgtcgaagcaggttccgtactccaaaccgtccaacaggcagccgaagcctcaaacaggctgttcccactcagtctcgccagcgaaggctcctgtcaaatcggcggcaacatcgcctgcaatgccggaggtttgaacgtattgcgttacggcacgatgcgcgacctggttatcggtttggaagtcgtcctccccaacggcgagctggtttcccatctccatcccctgcataaaaacaccaccggctacgacctgcgccatctgtttatcggcagcgaaggcacactgggcatcatcactgccgccacgctcaagctttttgcccgtccctcggacaaggcaacggcatgggtcggcatacccgacatcgaatccgccgtccgcctgctgaccgaaacccaagctcactttgccgaacgcctatgcagttttgagctgatcggccgttttgccgccgagttgtcttccgaattcagcaaattccccctgccgacacattcagaatggcatattttacttgagttgaccgactcattacccgacagcaatcttgatgatcggcttgtcgaatttctttataaaaaaggatttaccgacagcgtattggcacaaagcgaacaagaacgtatccatatgtgggcattgcgcgaaaacatctccgcatcgcaacgcaaactgggcaccagcatcaaacacgatattgccattcctatcggacgcgttgccgactttgtccgccggtgcgccaaagatttggaacagaattttaaaggcatacaaatcgtctgcttcggacatcttggcgacggcagcctgcactacaatactttcctgcccgaaatcctcagcaatgaagtctatcgttacgaaaacgacatcaacgacgcagtttatcgcaacgttcttgcctgcaacggcacgattgccgccgaacacggcataggtatcatcaaaaaacagtggctggacaaagtacgcacgcctgccgaaatcgccctgatgaaaagcatcaaacaacaccttgatccatataacattatgaatccgggcaaactgcttccgtaa

SEQ ID NO: 71771 - DNA, 2853 bp, Neisseria meningitidis; identical to SEQ ID NO: 45228

SEQ ID NO: 71772 - DNA, 1929 bp, Neisseria meningitidis
atgtccagaaaccaaaatcacgaagaataccaagacgatgcccgccccctgacgattgaggaacaacgcgctcgcctgcgccaactcatcattatgggcaaagaacgcggctacatcacctactccgaaatcaatgacgcactgcccgacgatatgtccgatgccgatcaaatcgacaacatcgtcagtatgatttccggtttgggtatccaagttaccgaacacgcccccgatgcggaagacatattgttaagcgacaatgccgccgttaccgacgatgatgccgtcgaagaagccgaggccgccctttccagcgcagattccgagttcggcagaaccaccgaccccgtccgcatgtatatgcgcgaaatggggcaggtcgacctgctgacccgcgaagacgaaatcatcatcgccaaaaaaatcgaaaacgccctgaaaaatatggttcaggccatctccgcctgcccgggttccattgcggaaatcttagaactcatcgaaaaaatccgcaaagacgaaatccgcgtcgacgaagtcgtagaagccattatcgacccgaatgaagtattgctcaacgaattgggcttggggcacttggaaaccacagcacccgagaaaccttccaacgacaattcggacgaaaacgaagacgacgaagaatcggaagaagatgcggatgaaatctcggcagccaatctcgccgaattgaaacaaaaagtcatcggccactttgcccaaatcgaaaaagactacaaaaaaatgatcggccgtttggaaaaacaccacagccggcacaaagactatctcgcctaccgcgacgcgattgccaacaaactgctggaagtccgtttcgccacccggcaaatcgacagcctcagcagcagcctgcgcggaaaagtagaaaacatccgcaaactcgaacgcgaaatccgcgacatctgcctcgaccgcgtccatatggagcgcgactacttcatccaaaacttcctgcccgaaatcaccaatctggaatggattgaagaagaaatcgccaaaggcagggtttggagcgacgcgctcgaccgcttccgccacgccatcctcgaaaaacaaaccgagttggcggatatggaaaaagaaacccgcatttccatcgaagagttgaaagaaatcaacaaaaatatggtgtcgagcgaaaaagaaaccgcagccgccaaacaggaaatgattcaggcaaacttgcgcctcgtgatttccatcgccaaaaaatataccaaccggggcttacaattccttgatctgattcaggaaggcaacatcggtttgatgaaagcggtcgataagttcgaataccgcagaggctataaattctccacctacgcaacctggtggatccgccaggcaattacacgctcgattgccgatcaggcgcgtaccatccgcattccggtacatatgattgaaaccatcaacaagatgaaccgcatctcgcgccaacaccttcaagaaaccggcgaagaacccgattccgccaaacttgccgaactgatgcagatgcccgaagacaaaatccgcaaaatcatgaaaatcgccaaagagccgatttcgatggaaacccccatcggcgacgacgacgattcgcacttgggcgacttcatcgaagatgccaacaatgttgcgccggccgatgcggcaatgtacaccagcctgcacgaagtaaccaaagaaatactcgaaagcctgaccccgcgtgaggcaaaagtcctgcgtatgcgtttcggcatcgatatgaacaccgaccacacgctggaagaagtcggcagacagtttgacgtaacgcgcgaacgcatccgacaaatcgaggcaaaagcactccgcaagctgcggcatccgacaagaagcgaccgtttgagaagtttcttggacagcgaagacagcaagctgtaa

SEQ ID NO: 71773 - DNA, 852 bp, Neisseria meningitidis; identical to SEQ ID NO: 56082

SEQ ID NO: 71774 - DNA, 288 bp, Neisseria meningitidis; identical to SEQ ID NO: 41116

SEQ ID NO: 71775 - DNA, 1116 bp, Neisseria meningitidis
atgcttaaatttaccttacacaaaaaagacggatacgcccgacgcggcacgctggagttgaaccacggcaaaatcgaaacgccggtatttatgcctgtcggtacttacggctcggttaaggcgatgaacccgcaaaacctgcacgacatcaaggcgcaaattattttgggcaacacttatcatttgtggctgcgtccgggcttggaggtcgtcgaacagtttggagggcttcacggctttatcggctgggacaaaccgattttgaccgactcgggcggttttcaggttttttctttgtcggatatgcgcaagctgacggaagaaggctgtacgtttaaaagcccgattaacggcgacaagctgtttttatcgcctgaaatttctatgaaaatccaaacggttttgaactcggacatcgcgatgcagttggacgaatgcacgccgggcgaggcgacgcgcgaacaggcgcgaaaatcgttgcaaatgagcctgcgctgggcggaacggagcaaaaaagcctttgaagatttgaaaaacccgaacgcactgttcggcatcgtgcaaggcgcgatgtatgaagatttgcgcgaagagtcgctgaaaggcttggaagagctcgatttccccggcttggccatcggcggcttgtccgttggcgaacctaagcccgaaatgtaccgcatgttgcgcgccgtcggccctatcctgccggaacacaaacctcattatttaatgggcgtcggtacgcctgaagacttagtgtacggcgtggcacacggcgtggatatgttcgactgcgtcatgcctactcgcaatgcgcgtaacggctggctgtttacccgttttggcgatttgaaaatcaaaaacgccaaacacaagctcgacaagcgtccgatagacgaaagctgcacctgctacgcctgccaaaacttcagccgcgcctacctgcaccatctgcaccgcgccggcgaaatcttgggcgcacagttgaacaccatccacaatctgcatttctaccaagtcattatggcggaaatgcgcgatgccatagaacaaggcaaatttgccgactggcaggcgcgattccacgaaaaccgtgctcgcggcacagactga

SEQ ID NO: 71776 - DNA, 393 bp, Neisseria meningitidis
  misc_feature 374, 375, 376, 377, 378: 'n' is a, c, g or t
atggatttcagttggttggcagaaccgcatacctggataggttttgccacgcttttggtgttggaagtcgtattggggatagacaatcttgtctttgtggcgattttggcaaacaaggtccagcccgcacggcgcgaccgcgcacggattatcgggctggggctggcagtcgtcatccgcatcattatgcttgcttttatggcgcacatcatcacgctgaccgagccgctgttccaaatcggcggcctcgccgtttccggcaaggacatgattatgctcgcgggcggtattttcctgctttacaaagccaccaccgaactgcatgaacgcctcgaagggcacaaccgttttactgttgccgacaaccaaaaaannnnncacacacttaattaa

SEQ ID NO: 71777 - DNA, 738 bp, Neisseria meningitidis; identical to SEQ ID NO: 37627

SEQ ID NO: 71778 - DNA, 1272 bp, Neisseria meningitidis
atgaaactgctggttatcggtaatggcggtcgcgaacacgcgctggcttggaaattggcgcagttgcctaaagtggaaacagtatttgttgcgcctggtaatgccggtacagcgattgaacccaagttgcaaaacatcgacttgactgcgcatcaggatttgattgaattctgtcgtaaagaaaatattgtttttactgtcgtcggccctgaagcgcctttggcggcaggtgttgtggatgatttccgtgccgcaggactaaaaatattcggtccgacacaatatgcggcgcagttggaaagttccaaagatttcgccaaagcatttatggcgaaatacaatattccaaccgcgcaatatcaaacctttgaaaacgccgatgccgcacatgattacgtcaatcagaaaggtgcgcctatcgttatcaaagccgatggtttggcggcaggtaaaggcgtgattgtggcgatgactttggatgaagcgcatgctgcgattgatgatatgctgctggacaacaaaatgggcaatgccggcgcgcgtgttgtgattgaagatttcctgcaaggcgaagaagcgagttttatcgtcatggttgatggcaataatgtactgcctatggcaaccagccaagaccacaagcgtcttttagacggcgacaaaggtctgaatacgggcggtatgggtgcgtacagccctgcgcctgtggtaacgcctgttgtgtacgaacgcgcgatgaatgaaattattttgccgaccgtagcagggatgaaagcggaggggcatgagttcaccggtttcctgtacgcaggtttgatgattgatcaaagcggtgcaccctatacgattgagtttaactgccgtttcggcgatcctgaaacccagccgattatgagtcgtctgaacagcgacttggcggatttggttgaagcggcaatagacggtaaacttgatagtgttgctgccgaatggaatccacaaactgccgtaggtgtagtgttggcggcgcaaaactatcctgaaacgcctaaaaaaggcgatgttatttccggtctggatgctgccaaccaggtaggcaaagttttccatgcaggtacaacggcaaacgagaaaggtgacgtattgaccaacggcggacgcgtattgtgtgttgtgggattgggcgacaatgtggcgcaagcgaaagctaaggcatatggcgcgttggaaaaaatcagcttcgacgggatgcaataccgtaaagacattgccgataaagcgattaaccgttaa

SEQ ID NO: 71779 - DNA, 357 bp, Neisseria meningitidis; identical to SEQ ID NO: 50177

SEQ ID NO: 71780 - DNA, 240 bp, Neisseria meningitidis; identical to SEQ ID NO: 37009

SEQ ID NO: 71781 - DNA, 618 bp, Neisseria meningitidis
atgtccgcttatcgaaaaggcaacatctttatcatttcggccgcttccggcacgggcaaaaccacgctggtgtcgcggctgttggcaaaccataacggtttgcgcgtttccgtatcgcacacgacgcgtccgccgcgtgaaggcgaagtaaacggcgtacattatcattttgtttctaaagaagagtttgagtcgcttatcgcgcaggaagcttttttggaatacgcagacgtgttcggcaactattacggcacaagcgcggagggcgtgaatgctttggcggcggcaggctatgacgtaattttggaaatcgacgttcagggcgcggcgcaggttcgcaacgcgctgccggaagccgtcggcatctttatcctgccgccgtctttcgatgtgcttgctgcacgtctgaacggacgcgggacggacagtcgggaagttatccaaaggaggctgtcgaaggcaaggcatgaaatcgagcagtccgtattgtttgactttgtcgtggtcaatgacgacttggcgcgagcggaggaggatttgcgccatattgtgaatgcctgccgtctgaaaaggtcgcggcaactggggtttattgcagatttgttggaaaattcctaa

SEQ ID NO: 71782 - DNA, 1476 bp, Neisseria meningitidis; identical to SEQ ID NO: 60823

SEQ ID NO: 71783 - DNA, 1647 bp, Neisseria meningitidis
atgaaacaatccgcccgaataaaaaatatggatcagacattaaaaaatacattgggcatttgcgcgcttttagccttttgttttggcgcggccatcgcatcaggttatcacttggaatatgaatacggctaccgttattctgccgtgggtgctttggcttcggttgtatttttattattattggcacgcggtttcccgcgcgtttcttcagttgttttactgatttacgtcggcacaaccgccctatatttgccggtcggctggttgtatggtgcgccgtcttatcagatagtcggttcgatattggaaagcaatcctgccgaggcgcgtgaatttgtcggcaatcttcccgggtcgctttattttgtgcaggcattatttttcatttttggcttgacagtttggaaatattgtgtatcggggggggtatttgctgacgtaaaaaactataaacgccgcagcaaaatatggctgactatattattgactttgattttgtcctgcgcggtgatggataaaatcgccagcgataaagatttgcgagaacctgatgccggcctgttgttgaatattttcgacctgtattacgatttggcttccgcgccggcacaatatgtcgccaagcgcgcccacattttggaagcagcaaaaaaagcgtcaacatggcatatccgtcatgttgcgcccaagtataaaaattatgttgtggttatcggtgagagcgcgcgttcggattatatgaatgtttacggtttcccattgcccgatacgccttttttgagtcagaccaaagggctgttgataaacggttaccaatcgaccgcccacgcgacgaatctttcgctgccgcagactttggggctgccgggagaaccgaacaataacatcgtcagcttggcgaagcaggcgggttttcggacggcgtggctgtctaatcaaggaatgttggggcattttgccaacgaaatttccacctatgccctacgcagcgattatccgtggtttacccaaaggggtgattatggcaaaagcgcggggttgagcgaccgccttttgttgccggcgttcaaacgggttttgataggaaatgcaggcacgaagcctcggctgattgtgatgcacctgatgggttcgcacagtgatttttgcacacgtttggataaggatgcgcggcggtttcagtatcaaactgaaaaaatatcctgctatgtttccaccatcgcgcaaaccgataaatttttagaagatacagttaagatattgaatgaaaataaagaaagctggtctttggtttacttttccgaccacggtttgatgcatgtcggtaaaggcggcgagcgaacgttgacacatggtgcgtggaagcgtcaaagctacggcgtgccgctggttaaaatttcgtccgatgacacgcggcgcgaaatgattaaagtgaggcgcagcgcgtttaattttttacgcggattcggcagttggacgggtatcgaaaccgacgagttgcccgatgacggctatgatttttgggggaatgttcccgatgtgcagggcgaaggcaataaccttgcctttatcgacggactgcccgacgaccccgcgccgtggtatgcgggaaaaggcaaatcgactaaaaatacgtctaaaaaatga

SEQ ID NO: 71784 - DNA, 693 bp, Neisseria meningitidis; identical to SEQ ID NO: 55087

SEQ ID NO: 71785 - DNA, 1194 bp, Neisseria meningitidis; identical to SEQ ID NO: 55300

SEQ ID NO: 71786 - DNA, 369 bp, Neisseria meningitidis
ttgaataatattcctgttgaaatccgtttgttgaaaaaccgtaccgtgttggttttgacttatggggacgaacctaaaaatctgcctgccgaatttttacgcgtctattcgccgagtgccgaagtgcgcggacacggcgtgggacaggatgttttgcagaccggcaaggcggatgtgcaaattacggatttgcagcctgtcggacagtacgcgctgaaaatcgttttttcggacgggcacgacagcggtctttacgattgggcgtatctgcacagactggcatacggatacgatgcgatgtggcaggaatatttggacaaattggcggcggcgggtgcttcccgttttgaaaagcaatcagattgttaa

SEQ ID NO: 71787 - DNA, 687 bp, Neisseria meningitidis
atggcagacctgaccttccaacaagccgtttccaacatcatcggtatgaaaggcgaaatcgtccgcgcattgggcgaaaccttcgtgatggtcggcttgtccaccacattcgccgtcgttttcggcacgttgctgggcgtgttgctcttcgtaacttccagccgccaactgcattacaacaagccggtgaacttcctgctcgacaacctcgtcaacctcatgcgcgccttccccttcgtcatcctgatgattgcgatgatacccgccacacgcgccatcgtcggcagcaccatcggcccgattgccgcctcgctggtgttgagcgtgtcgggattgttttattttgcccgactggtggaacaaaacctgcgcgaagtccccaaaggcgtgattgaagccgccgccgcgatgggtgcgccgccgcttgccatcgtccgcaaagtcctcttaaacgaagcgcgcgcgggtatggtttccagcattaccgtgcttgccatcgggcttttgtcatacagcgcggcggcagggatgataggcggcggcggcttgggcgacctcgccatccgctacggctactaccgctaccaaaccgaagtcatcgtcttcatcgtcgccctcctcgtgctgctggtcatcctgattcaaagcaccggcaacacgttggcgcggaaactcgacaaacgttaa

SEQ ID NO: 71788 - DNA, 1296 bp, Neisseria meningitidis; identical to SEQ ID NO: 60610

SEQ ID NO: 71789 - DNA, 1422 bp, Neisseria meningitidis; identical to SEQ ID NO: 54344

SEQ ID NO: 71790 - DNA, 1278 bp, Neisseria meningitidis
  misc_feature 8, 9, 10, 11, 12: 'n' is a, c, g or t
gtgtgtgnnnnncccgatgccaataaaggtatcgcgctgctgattttcgttgccgcactttggtttaccgaagccgtccacattaccgtaaccgcactgatggtgccgattctcgccgtcgtactcggtttccccgacatggacatcaaaaaggcgatggctgatttttccaacccgattatctacatttttttcggaggcttcgcgcttgccaccgccctgcatatgcagcggctggaccgtaaaatcgccgtcagcctgttgcgcctgtcgcgcggcaatatgaaagtggcggttttgatgttgttcctcgttaccgcctttctgtccatgtggatcagcaacaccgccaccgccgcgatgatgctgcctctagcaatgggtatgctgagccacctcgaccaggaaaaagaacacaaaacctacgtcttcctcctgctcggcatcgcctattgcgccagcatcggcggcttgggcacgctcgtcggctcgccgcccaacctgattgccgccaaagccctaaatctggacttcgtcggctggatgaagctcggcctgccgatgatgctgttgattctgcccttgatgctgctctccctgtacgtcatcctcaaacctaatttgaacgaacgcgtggaaatcaaagccgaatccatcccttggacgctgcaccgcgtgatcgcgctgttgattttccttgccacagccgccgcgtggatattcagctccaaaatcaaaaccgccttcggcatttccaatcccgacaccgttatcgccctgagtgccgccgtcgccgtcgtcgtcttcggcgtggcgcaatggaaggaagtcgcccgcaataccgactggggcgtgttgatgctcttcggcggcggcatcagcctgagcacgctgttgaaaacatccggcgcgtccgaagccttgggacagcaggttgccgccaccttttccggcgcgcccgcatttttggtgatactcatcgtcgccgccttcattatttttctgaccgagttcaccagcaacaccgcctccgccgcattgcttgtaccgattttctccggcatcgctatgcagatggggctgcccgaacaagtcttggtattcgtcatcggcatcggcgcatcttgtgccttcatgctgccggttgccacaccgcctaacgcgattgtgttcggcacgggcttaatcaagcaacgcgaaatgatgaatgtcggcatactgctgaacatcctctgcgtagtattggttgctctgtgggcttatgctgtactgatgtaa

SEQ ID NO: 71791 - DNA, 1677 bp, Neisseria meningitidis
atgagcttcaaaaccgatgccgaaatcgcccaatcctccaccatgcgcccgattggcgaaattgccgccaagcttggtctgaatgccgacaacattgagccttacggtcattacaaggcgaaaatcaatcctgccgaagcgttcaaactgccgcaaaaacagggcaggctgattttggttaccgccatcaacccgactccggcgggcgaaggcaaaaccaccgtaaccatcggtttggcggacgcgttgcgccacatcggcaaagatgccgtgattgccctgcgcgaaccttctctggggccggtgttcggcgtgaaaggcggcgcggcaggcggcggctatgcccaagttttgccgatggaagacatcaacctgcacttcaccggagattttcacgccatcggtgcggcgaataacctgctcgccgccatgcttgacaaccatatttaccaaggcaacgagttgaacatcgatccgaaacgcgtgctgtggcgtcgcgtggtcgatatgaacgaccgccagttgcgcaacatcatcgacggtatgggcaagcctgttgacggcgtgatgcgtcctgacggttttgatattaccgttgcctccgaagtgatggcggtattctgccttgccaaagacatcagcgatttgaaagagcgtttgggcaacatcctcgtcgcctacgccaaagacggcagccccgtttacgccaaagatttgaaggcacacggcgcgatggcggtcctgctcaaagatgcgattaagcccaatttggtgcaaaccatcgaaggcacgcccgccttcgtacacggcggcccgttcgccaacatcgcccacggctgcaactccgtaaccgcaacccgtctggcgaaacaccttgccgattacgccgtaaccgaagcaggcttcggcgcggatttgggcgcggaaaaattctgcgacatcaaatgccgccttgccggtttgaaacctgatgcggcggtcgtcgtggcgactgtccgcgctttgaaatacaacggcggcgtggaacgtgccaacctcggtgaagaaaacctcgaagccttggcaaaaggtttgcccaacctgctgaaacacatttccaacctgaaaaacgtattcggactgcccgtcgtcgttgcgctcaaccgcttcgtgtccgactccgatgccgagttggcgatgattgaaaaagcctgtgccgaacacggcgttgaagtttccctgaccgaagtgtggggcaaaggcggcgtgggcggtgcagacttggcgcgcaaagtcgtcaacgccattgaaaatcaaaccaataacttcggtttcgcctacgatgtcgagttgggcatcaaagacaaaatccgtgcgattgcccaaaaagtgtacggcgcggaagacgtcgatttcagcgcggaagcgtctgccgaaatcgcctcgctggaaaaactgggcttggacaaaatgcccgtctgcatggcgaaaacccaatactctttgagcgacaacgccaaactgttgggctgccccgaaggcttccgcatcactgtgcgcggcattaccgtttcttctggcgcgggcttcatcgtcgccctgtgcggcaatatgatgaaaatgccgggtctgccgaaagttccggctgccgagaaaatcgacgtggacgcagaaggcgtgattcacggcttgttctga

SEQ ID NO: 71792 - DNA, 717 bp, Neisseria meningitidis; identical to SEQ ID NO: 61053

SEQ ID NO: 71793 - DNA, 1812 bp, Neisseria meningitidis; identical to SEQ ID NO: 55230

SEQ ID NO: 71794 - DNA, 2364 bp, Neisseria meningitidis
atgcaattctcctactcatggctgaaaacccaagccgataccgaactttcctccgataagctggaacatctgttaacgatgtccggcttggaagtggaagaggctgaaactgccgcgcctgcgtttgcgggcgtggtgattgccgaagtgaaatccgttgaaaaacatccggatgcagaccgtttgaacgttacccgagttgatgcgggtacgggcgggttggtgcagattgtgtgcggtgcgccgaatgtgaaagcgggcatcaaagtgccgtgttcgctgccgggtgccgttttgccgggtaatttcaaaatcaagccgaccaaaatgcgcggtgtgccatcaaacggtatgctgtgttcgaccaatgaactaggtttgcctgatgatggtgtagacggcctgcacattttgcctgaagacgcgcctgtcggtatcaatatccgtgaatacttggatttggacgatacgctgtttacgttgaaaattacgcctaaccgcgctgattgcttgagtgttaagggcattgcgcgcgaagtgtccgcattgacggggtgcgcgttcaggcagcccgaaatccataccgcgccgatcacgggcagtcgaaaacagcccgtgcagattaacgcgcctgccgattgcggccgttttatcagccgcgttattgaaaatgtcaatgcgaaagcggctactcccgattggatgaaacaacgtttggagcgcagcggcatccgcagtatttccgtgctggtggacatcggcaattatgtgatgctggaaatcggccagccgatgcacgttttcgatgccgacaaactttccggcagcctgcacatccgccgcgcgcgcgaaggggaaacgctggaatgcctgaacgagaaaaccgtttccctgtctgaaaatacgctggtcgtggcagacgaaaaaggcgcgttgagtttggcgggcttaatgggcggcgcggcgagcgcggtttcagacggcacgcaaaatatcgtgctggaagcggcttggtttgcgcccgaaatcatcgccggcaaatcgcgccaatacggtttcggttcggattcgtcgttccgcttcgagcgcggcgtggattaccgtttgcaggcggatgccattgaacgtgctaccgaattggtgttgcagatttgcggtggtgcggcaggcgagatggtggaagcgcaaggcgaattgcctgaagcgaagcaggttggattgcgtttggaccgtctgaaaaccgtgttgggcgtggacattcctgccgaacaggtggaaaccattttgcaacacttgggcctgcagcccgagaaaacggcggaaggcttccgcgttaccgcgccgagcttccgttttgacatcgaaattgaggctgatttgattgaagaaatcggacgcgtttacggctatgaaaacatccccgacgattacacgtcaggccgtctgaaaatgctggaactgcccgaaacacgccgcccgcgttttgccgtttacaacgaaatggcggctcgcggttaccgcgaagtggtcagctatgccttcgttgacgagcagtgggaacaagattttgccgccaacgccgaccccatccgcctgcaaaacccgctggcggcgcagtatgccgtgatgcgttccacgctcatcggcggcttggtggaaattctgcaaaacaatctgaaccgcaaacaaaaccgcgtgtgcgtgtttgaaatcgcccgcgtgttcagcaaaggttcagacggccagtttgtccaaaacgaacgcatcggcggattgtggtacggcgcggtcatgccggaacaatggggcgggaaaacgcgcaatgcggatttttacgacatcaaggcggacgtggaaaatctgttgaaaaacaaagcagtcgagttcgttaaaaccggacatcccgccctgcatcccggacgtgccgccaatatcgtttcagacggcaaagtcatcggctttgtcggcgaactgcatccgaaatggctgcaaaaatacgacctgccgcaagcgccgctggtatttgaaatcgatatggcggccgtgttggaatgcgggaaaacgcgctatcgggtcgtatcgaaattccagccggtgcgccgcgatttggcgtttgtgatgccggaagctatgagccatgatgatttgctgcttgtcttgaaaggcgcggcaaacaagttggtacaggaaatcagcgtgtttgacgtgtatcgcggcacgggactgcccgaagggatgaagagcgtggcggtcaaagtgattttgcaggatatggaaaacacgctgacggatgaggcagtcgagccgcttatcggaaaactgattggcgcggcaacggcggcaggggcgcggcttcgcagttaa

SEQ ID NO: 71795 - DNA, 777 bp, Neisseria meningitidis; identical to SEQ ID NO: 37612

SEQ ID NO: 71796 - DNA, 1149 bp, Neisseria meningitidis
atgcccctccccctcccctctcccgaagcacggcaattctcgctcaaactgcaaaccctcattgccgaaaaaatcggcaaacacggcaactggattccattttcacgttttatggaattggttttatacgctccgcaatacggctactacaccggcggcagccataaaatcggcaataccggggattttattaccgcaccgaccctcacctctctgtttgcacagacactggcacgccaacttcaagaacttctatcccaaacggcgggcaatatctatgaattcggcgcgggaaccggacagcttgccgccgatttgttgggcagcatttcggacggcatcagccgttactatattattgaaatatcgccggagctggcagcacgtcagaaaaacctgattcaagcccgcgcaccggaagcatctcaaaaagttgtccacttgaccgcacttcccgaagcgtttgacggcatcatcatcggcaacgaagtactcgatgccatgcctgtcgaaatcgtccgtaaagatgaaggcggctcattcgagcatgtcggcgtttgcacggacaacggccgtttcgcctattctgcaagacccttgcacgacccgtcgctttccacctcggcttccctctattttcctcaaacagattatccctacaccagcgaactacatccgcaacaatatgcctttatccgcacccttgcctcaagactcgaacacggctgcatgatattcatcgactacggttttgatgcagcgcagtattaccacccgcaacgcaatcaaggtactctaatcggacactaccgacatcacgttatccacaatccttttgacttcatcggattggccgacctgaccgcgcatgtcaactttaccgacattgcccaagccgggacggatgccggattagatttgataggttaccttccccaatcccatttcttattgaacctgggcattaccgagctattggcacagacggggaaaacgaattcggcagcctatatccgtgaagctgctgccgttcagaaactgattgaccagcacgaaatgggcgaactgtttaaagtcatcgcattcggaaaaaatatcggcatcgactgggcaggattccgcttcggcgacatctgccacaaactctaa

SEQ ID NO: 71797 - DNA, 648 bp, Neisseria meningitidis
atgaaaggcgtttacttcgtcagcggcatagacacggacatcggcaaaaccgtcgccaccggcgtgttggcaaaacaattgttgcagcagggcaaaagcgtgattacgcaaaagcccgtgcaaaccggttgccaaaacattgccgacgacatagccgtccatcgtaaaatcatgggtaaacccatgcaggaagccgacaaacaagggctgaccatgcctgaaatcttcagttatccagcttcgcctcatctcgctgcccgtcttgacggcagggctttggacttggacaaaatccgcaccgccacacaagaattggcggcgcagtacgaagtcgttttggtcgaaggcgcgggcggattgatggttccgctgacggaaaacctgttaaccattgattatatccgtcagcaaggctatcccgtcatcctcgttaccagcggacggctcggcagtatcaaccacactttactcagtttcgccgcgctcaaacaatacggcattcgcttgcacagcctcgtgttcaaccacatccacgacagccgcgacgcacacatcgcccaagacagcctgagctacttgaaatgccgtctgaaagccgatttttccgaagcggaatggatggagttggcaaaaacagacgcggtataa

SEQ ID NO: 71798 - DNA, 543 bp, Neisseria meningitidis
atgattaatcatattgaaaaatatacaggcactatttctcatggctcgaaaagtgattcgggaagtcagtacaaattaaatatcgcagctattccctcttcccctaacagggatttaaaaacttatattactttagggttaagcaaacatgatctgaattataaaagcagatctgaaatactttttgtatgttctttaaaatatgatgaaaatcagatttttccatttttaagatggttggcagaaaccatcattgagaataaaaaaatccttcttcgggggcaggttgtttatttgcccagaagcattgttgattcaacaaaaatggatgcactgtatgtttccgccccattttatttcgacgatgattttcaggtctgttatggcgaacactacaatatcgttttccctttgcttgtccccttgtataaacaggaagccgaattggtggaaaagaaaggttggaatgcttttgagcagttcttgttggataatgaagttggcaacctttcggatatgaatcggaaaccgtttacttggtaa

SEQ ID NO: 71799 - DNA, 996 bp, Neisseria meningitidis
ttgaaggctgcctatcaaaatattgcaactgtctggcagggcgatttccacaatgccaaacaggtgctttccgcaatgaagaagagggttcgcaaacctgccgccgtccgttccgatgcggatatcgccgcccttttccatgcccaccgtatgaagcaggcgcagcagagccgtattctgaatatgcttgccgttgaaatccgccccggttttgtgttggacaacaaacgcgcgcccgatatacgcgccgccctgctcgacgtgtacggagaggcggacggcaaaccgtttttcctgccgctcaatctgctgctggggtttatgggtgcgcacgagtggcataagaaaggggttgccgttccgcagctgggcggcagcatacacgttcctttcggcgtattctcgccgttgcgcggcgaatacctcgacctgctcgcccatgcgccgtcaacgggttttcagacggcattagatatcgggacgggctcgggcgtgcttgccgccattttggcgaaacagggcattccttccgtcatcggcacggataccaatccgaaagccgtcgcctgcgcccgtgccaatattgcccgtttgggctttgaaaaacaggttgaaatccgcgaaaccgatctgtttcccgaagggtttgtcgatctgatcgtctgcaatccgccctggcttcccgccaagccgacttccgccgtcgaatccgcgttatacgaccccgaatctgcgatgctggctgcgtttttgcgggatgcgccgaaacatctgaatcccgacggagaaatccgcctgattatttccgaccttgcagagcatttggggctgcgccctgccgattttttggaaaaggcatttatccgggcgggtttgcgtgttgccgatatgataaaaaccaagccgaagcacaaaaaagccgcgaatccgagcgatccgcttgcttttgcgcgaacccgggaaaccactttcctataccgtttgaaaaaggcataa

SEQ ID NO: 71800 - DNA, 432 bp, Neisseria meningitidis; identical to SEQ ID NO: 38797

SEQ ID NO: 71801 - DNA, 423 bp, Neisseria meningitidis; identical to SEQ ID NO: 38711

SEQ ID NO: 71802 - DNA, 924 bp, Neisseria meningitidis
atggatattgaaaccttccttgcaggggaacgcgccgccgacggataccgttgcggcttcgtagcgattgtcggccgtccgaatgtcggcaaatcaacgctgatgaatcatctcatcggtcagaaaatcagtattaccagcaaaaaagcgcagacgacgcgcaaccgcgtaacggggatttataccgacgataccgcgcagtttgtgtttgtcgatacgccgggctttcaaaccgaccaccgcaacgcgctcaacgacaggctgaatcaaaacgttaccgaggcgcttggcggcgtggatgtggtggttttcgtcgtggaagcgatgcgctttaccgatgccgaccgtgtcgtgttgaaacaactgcccaagcacacgccggtcattttagtggtcaacaaaatcgacaaggacaaggcgaaagaccgttacgcgctggaggcgtttgttgcccaagtgcgcgccgaatttgaatttgcggcggcggaggcggtcagtgcgaaacacggattgcggattgccaacctgttggagctgctcaagccgtatctgcccgaaagcgtgccgatgtatcccgaagatatggttacggacaaatcggcgcgttttttagcgatggaaatcgtgcgtgaaaaattgttccgctatttgggcgaggaattgccttatgcgatgaacgtcgaagtggagcagtttgaagaggaagacggtttgaaccgcatctatatcgccgttttggtcgataaggaaagccaaaaggcgattttaatcggcaaaggcggggagcgtttgaagaaaatttccaccgaagcgcggttggatatggaaaaactgtttgataccaaagtgtttttgaaagtgtgggtcaaagtcaaatccggttgggcggacgacatccgcttcctgcgcgagctgggtttgtag

SEQ ID NO: 71803 - DNA, 1263 bp, Neisseria meningitidis
atgtcaaacacacaaaaacagcttgcccttgccaaagcggcaaaaaaatccgtcaacacggcggatacggaagaaaaaaaccgcgcgctgtttgctatggcgaacagcttggaagcggcggcggcagatattttggcggcaaaccgtcaagacttggaagccgcggcaggcaacattcccgaaagcatgaccgaccgccttttgttggacggcaaacgcattggcgcgatggcggacggcatcagggcggttgccgcgctgcccgaccccgtgggcgaaatactggaaacctcgactttgcccaacggcttggaaatcgtcaaaaagcgcgtggcgatgggcgttatcggcattatttacgaaagccgcccgaacgttacgtccgatgcggcggctttggcactgaaaagcggcagcgcggtcgtactccgcagcggcaaagatgcattccaatccgcacgcgccatcgttgccgccctgaaaacggggttggcacaaacccgcatcgaccccgacgcgctccagttgattgaagacacagggcgtgagggcagttacgaaatgatgagggcgaaagattatctagacctgctgattccgcgcggcggggcggggctgatacgggcggtggttgaaaatgccgtcgtgccggtcattgaaacggggacgggcatcgtccacatttatatcgacaaggacgcggattgggacaaggcgctccgtatcgtgtacaacgccaaaaccagccgtccgtccgtgtgcaactcgatggaagtgctgctggtacatgaagacattgctgccgacttcctgcccaagctcgaacggctgttggttcgcgaccgcatagaagccggactgccgcccgtccgcttccgtttggatccgcaggcggcgcggcatatcggcggcgaagcggcgggtgcagacgatttcgataccgagtttttagactacatcctcgctgtgaaaaccgtcgcttcggtcgaagaggcggtctggcacatcgaaacccacagcacacaccattcagacggcatcgttaccgaaaaccgccacgctgcggactatttcacgactcatatcgattctgccgccgtgtatgtcaacgcgtccacgcgctttaccgacggcggcgaattcggcttgggttgcgaaatgggcatctccacgcaaaaactccacgcccggggcccgatgggtttgaaagagctgacgagttacaaatacatcgtacaaggcacgggacaggtcagggaataa

SEQ ID NO: 71804 - DNA, 1548 bp, Neisseria meningitidis
atgcagcttaatcctgctgaaattagcgatttgattaaagccaagatcgaaaatctgtctgtaaatgccgaagtgcgtacccgtggtacggtgatttcggtaactgacggtatcgttcgcatccatggtttgtcagatgcaatgcaaggtgagatgctcgaattcccgggtaacactttcggcttggcgatgaacctggagcgcgactccgtcggcgccgtagtgttgggcgagtacgaacatattaaagaaggcgacacggttacttgtaccggtcgtatcttggaagtgccggtcggacgcgaactggtcggacgcgtcgttgatgcattgggtcgtccgattgacggcaaaggcccgattaatacaactttgaccgcccctatcgaaaaaatcgcaccgggcgtgattgcgcgcaaatcggttgaccagccgatgcaaaccggtctgaaggcgattgactctatggttcctgtcggtcgcggtcagcgtgagttgattattggcgaccgtcagacaggtaaaacggccgtagcattggatgccatcgtcaaccaaaaaggtacgggcgttatctgtatctatgtcgctatcggtcaaaaagcatcttctattgccaacgtggtccgcaaattggaagagcatggcgcgatggaacacaccatcgtggttgctgcaactgcatctgaagcggcggcattgcaatatatcgcaccttactccggttgtacgatgggtgaattcttccgcgaccgcggcgaagatgccttgattgtttatgacgatttgtccaaacaggctgtggcttaccgtcaaatttccctgcttttgcgccgtccgcccggccgcgaagcctatcccggcgatgtgttctacctgcattcccgtctgttggaacgtgcagcacgtgtcaatgaacacgaagtggagaaattgaccaacggcgaagtaaaaggcaaaaccggttctctgaccgcgttgccgattatcgaaacccaagcgggcgacgtatctgctttcgttccgactaacgtcatttcgattaccgacggtcagattttcttggaaaccgacctcttcaacgccggtatccgtcctgcaatcaatgccggtatttccgtatcccgcgtaggcggtgctgcacaaaccaaagtgattaaaaagctgggtggcggtatccgtttggcgttggcgcaatatcgtgaattggcggctttctcgcaatttgcatccgatttggatgaagctacgcgcaaacaattggagcatggcgaagtcgtaaccgaactgatgaaacagaaacagttcagtacgttgaatacggctgaaatggctttgaccctttgggcaatcaacaacggttcgtattctgatgttccggttgccaaagctctggcttttgaatctgaatttttgagctttgtccgtacccaacatccggaagttttggaagccgtcaatgcttcaggtgcaatgtccgacgagagcgagaaaacgcttgaagcagccatgaaatccttcaaatcttcttacgcctatcaggcataa

SEQ ID NO: 71805 - DNA, 216 bp, Neisseria meningitidis
  misc_feature 4, 5, 6, 7, 8: 'n' is a, c, g or t
gtgnnnnnttaccgtgccattgtttcccatcctttggtcaagctggttttaatcggtgtattgtgggcttatctgcaccattctctcgccggtatccgctttttatttttggatgcgcacaaaggccttgagctgaatactgcgcgcaataccgctaaagccgtatttgcttctgcattggttttgactgtcgttttgggagcgttgttatggtag

SEQ ID NO: 71806 - DNA, 777 bp, Neisseria meningitidis
atgaccctcatccacccgaccgccgtcatcgaccccaaagccgaactcgactccggcgtcaaagtcggcgcgtacaccgttatcggccccaacgtccaaatcggcgcgaataccgaaatcggtccgcacgccgtcatcaacggccacaccagcatcggcgaaaacaaccgcattttccaatttgccagcctcggcgaaatcccgcaggacaaaaaataccgcgacgagccgaccaagctgattatcggcaacggcaacaccatccgcgaattcaccacctttaatttaggcacggtaaccggcatcggcgaaacccgtatcggcgacgacaactggattatggcgtactgccacctcgcgcacgactgcgtcatcggcaaccacaccatcttcgccaacaacgcctcgcttgccggacacgttaccatcggcgactacgtcgttttgggcggctacacgctggttttccaattctgccacatcggcgactacgccatgaccgccttcgccgcaggcgtacacaaagacgtaccgccctactttatggcatcgggctaccgcgccgaaccggcggggctcaacagcgaaggcatgcgccgcaacggttttaccgcagaacagatttccgccgtcaaagacgtgtacaaaaccctctaccatcgcggcattccgtttgaagaggccaaggcagacatcctccgccgcgccgaaacccaagccgagcttgccgtattccgagactttttcgcacaatcggcgcacggcatcatccgctga

SEQ ID NO: 71807 - DNA, 2889 bp, Neisseria meningitidis
atgagtaacacaaccgtagaacaatttgccgccgagctgaaacgccccgtcgaagacctgttgaaacagttgaaagaagccggcgtcagcaaaaccggcggcggcgattccctgacgctggacgacaaacagcttctgaacgcctacctgaccaagaaaaacggcagcaacggcggcaccatcagcatccgccgcaccaaaaccgaagtcagcaccgttgacggcgtaaaagtcgaaacacgcaaacgcggacgcactgtcaacattccttctgccgaagagttggcagcacaggtaaaagccgcccaaacccaagccgcacctgtccggccggagcagacggcagaagacgcggcaaaagcccgagccgaagctgccacacgtgcagaagcccgtgccaaggcagaagcggaagcggcaaaactgaaagcggcaaaagcaggcaacaaagccaaacctgccgcgcagaaacccaccgaagcaaaagccgaaaccgcacccgttgcggcggaaaccaaacccgccgaagaaagcaaagcggaaaaagcccaagccgacaaaatgccgtctaaaaaacccgccgagcccaaagaaaaagccgccaagccgaaacacgagcgaaacggcaaaggcaaagatgccaaaaaaccggcgaaacctgccgcacccgccgccccgcaacccgtggtcagcgcggaagaacaggcgcaacgcgatgaagaagcacgccgtgccgccgcacttcgcgcccaccaggaagccctgttgaaagagaaacaggaacgtcaggcacgccgcgaagccatgaaacaacaggcagaacaacaggcaaaagccgcacaggaagccaaaaccggcagacagcgtcccgccaaacctgccgagaaaccgcaggcagccgcgccggccgtcgaaaacaagcctgtcaatccggcaaaagcgaaaaaagaagaccgccgcaaccgcgatgacgaaggtcaaggccgcaacgccaaaggcaaaggcggaaaaggcgggcgcgaccgcaacaatgcacgcaacggcgacgacgagcgcgtacgcggcagcaaaaaaggcaaaaaactcaaactcgagccgaatcaacacgccttccaagcaccgaccgaacccgtcgttcatgaagttttggttcccgaaaccattaccgttgccgatttggcgcacaaaatggcggtcaaaggcgtggaagtggtcaaagccctgatgaagatgggcatgatggttaccatcaaccaatccatcgaccaagacaccgccctgattgtggtggaagaactcggccacatcggcaaacctgccgcagccgacgaccctgaagcattcttggacgagggcgcggaagcagtggaagccgaagcattgccgcgtccgcccgtcgttaccgtgatgggtcacgtcgaccacggcaaaacctcgctgctggactacatccgccgtaccaaagtggtacagggcgaagcaggcggcattacccaacacatcggtgcataccacgttgaaaccccacgcggcgtgattaccttcttggatactccgggtcacgaagcgtttaccgccatgcgcgcgcgcggcgcgaaagcgaccgacatcgtgattctcgtggttgccgcagacgacggtgtaatgccgcaaaccatcgaagccattgcacacgccaaagcggcaggcgttccgattgtggttgccgtcaacaaaatcgataaagacactgccaaccccgaacgcatccgccaggaactgacccaacacgaagtgatccccgatgattggggcggcacggttcaattcatcgacgtttctgcgaaaaaaggaacaaacatcgacgcgctgctcgaagccgtattgctcgaagccgaagtattggaactgaccgcacctgtcgatgcgcccgccaaaggcatcatcgtcgaggcgcgcttggacaaagggcgcggcgcggttgccacattgctggttcaaagcggtacgctgaaaaaaggcgatatgctgctggccggtaccgcgttcggcaaaatccgcgcgatggtcgatgaaaacggcaaatccattaccgaagccggcccgtccatccccgtcgaaatcctcggcttgtccgacgtaccgaacgcaggcgaagacgcgatggtgttggcggacgagaaaaaagcgcgcgaaatcgccctcttccgccaaggcaaataccgcgacgtgcgccttgccaaacagcaggcggcgaagctggaaaatatgttcaacaatatgggcgaaacccaagcccaatctttgtcggtcatcatcaaggcagacgtgcaaggttcttacgaggctttggcgggcagcctgaaaaaactgtccacagacgaagtgaaagtgaacgtattgcacagcggcgtgggcggcattaccgaatcggatgtcaacttggccatcgcgtccggggcgttcattatcggctttaacgtgcgtgcagatgcctcttcgcgcaaacttgccgaaaatgaaaacgtggaaatccgctactacaacatcatctacgatgccatcgacgacgtgaaggcggcgatgagcggtatgctttccccggaagagaaagaacaggttaccggcacggtcgaaatccgtcaggtcatctccgtttccaaagtcggcaacattgcaggctgtatggttaccgatggtgtggtcaaacgcgattcccatgtccgcctcatccgcaacaacgtggtcatccacacgggcgaactggcttcgttgaaacgctataaagacgacgtaaaagaagtccgcatgggctttgagtgcggtctgatgctcaaaggctacaacgaaatcatggaaggcgaccaactggaatgcttcgacatcgtcgaagttgcccgcagcctgtaa

SEQ ID NO: 71808 - DNA, 786 bp, Neisseria meningitidis
  misc_feature 763, 764, 765, 766, 767: 'n' is a, c, g or t
atggcgaaaatcattacgccgctgtcggcaaatcaggttaaaaatgcgaagccgcgcgataagctgtataagttgtcagacgggggcgagctggctttgtgggtctacccgacgggcgggcggagttggaagctgtcgtttgtgcaggatggaaggcagcagacaatttcgctggggcggtatcctgatttttcgctggccgatgcgcgggaatggcgggaggaggtgcgccgaaaacgggcgcacggggaaaatgtcgtcaataagaaggtgcgggcggattttgcttttgagaaggtggcgcgtgattggtttgtgcgttggtcgaaggggcggtctgaaaagtatgccggacaggttatgcggaattttgagcggtgggtttttccggctatcggcaatcttgatattcgtcaaatcaggacggcggatgtggtcggctgtctgcgtgtgatggaggcgcgcggtatcgttgatacgttgcgcaaaacgaaaaacagtctgaagatggtgtttgcgtttgcggtcggttcgggaatgatggaaatcaaccctgtcgcgcaaatcggttcgggtgtgtttgaacgggcgaaaacggggaatatggcagcgttgagtccgtctgaattgccgcgcctgattgattttttggagcagcgcaatgaatttgcggtttatgcgggcagggtgcgtatccatcctgtaacgcggctttgtatctattggctgctgttgacaatgacgcggattcaggaggcggcgnnnnncacacacttaattaattaa

SEQ ID NO: 71809 - DNA, 411 bp, Neisseria meningitidis; identical to SEQ ID NO: 61367

SEQ ID NO: 71810 - DNA, 1017 bp, Neisseria meningitidis
gtggggacggtcttggtgtcggtggtggcgcagttggacggggcgggtgcgacgacgtttttattggtcgtccccgcccttttgccgctttacaagcgtctgcatatgaatccttacctgctgtttttgctgctgacttccagtgcgggattgattaaccttctgccgtggggcgggccgactgggcgggttgcaagcgtgttgggcgcagatgtgggcgaattgtataaacctttgttgacggtgcaaattatcggtgtagtgtttatccttgcgctgtccctgcttttgggtgtgcgtgaaaaaaggcggattgtccgggagttgggcgcgttgcccgccgtggcggatttgataaagccggtgcctttgtcggaagaagaacaaaaattggcgcgtccgaaactgttttggtggaatgtcctgctgtttttggcggcgatgagcctgcttttttcgggcatcttcccgccgggttatgtatttatgctggctgcaacggcggcgttgcttttgaattaccgcagcccgcaggaacagatggagcggatttatgcccacgccggcggcgcggtgatgatggcgtccattattttggcggcaggtacgtttttggggattttgaagggtgcggggatgttggacgcgatttccaaagacattgtgcatatcctgccagacgcgctgctgccttatctgcatattgccatcggtgtgttgggcattccgcttgagttggttttgagtacggacgcttattatttcggactgtttccgattgtggagcagattacctcgcaggcgggcgtggcgcccgaagcagcaggttatgcgatgttgatcggcagtatcgtcggcacttttgttacgccgctttcgccggctttgtggatgggcttgggtttggcgaaattgtcgatgggcaaacacatccgttattcgtttttttgggcgtggggtttgtcgctggcgatattggccagttcgatagcggcaggaatcgtgcctctgccgtaa

SEQ ID NO: 71811 - DNA, 1104 bp, Neisseria meningitidis; identical to SEQ ID NO: 54868

SEQ ID NO: 71812 - DNA, 600 bp, Neisseria meningitidis; identical to SEQ ID NO: 61911

SEQ ID NO: 71813 - DNA, 798 bp, Neisseria meningitidis
atgaaagccttgcataaaacatcattttgggaatctttagccattcaaaggcgcgtaatcggtgcgcttttgatgcgggaaattatcacccgttacggtcgcaataatattggctttttatggctgtttgttgagccgttgctgatgacattcgttatcgtcttgatgtggaaatttttaaaggcagaccgatattcaactttgaatattgtcgcatttgcgattactggctatccgatgttgatgatgtggcgtaatgcctcaaaacgggcagttgggtcgatttcttcaaatgccagcttgctttatcaccgcaatgtaagagttttggataccatcttggcgcgcatgattttggaaattgctggtgcaaccattgcgcagattgtgattatggcggtattgattgcgattggctggattgaaatgccggcagatatgttttatatgctgatggcttggcttttgatggctttttttgcgattggtttgggtttggtgatttgttcgattgcctttaatttcgagccgtttggcaagatttggggcacattgacttttgtgatgatgccgttatcgggtgcattcttttttgtacataatttgcctccgaaagtgcaagagtatgcattgatgatcccgatggtgcatggcacagaaatgttccgtgccggatattttggcgacagcgtcacgacttacgaaaatccttggtatattttgttgtgtaacttggttttgctgctgcttggtttggcggtggtggcgagattcagcaaaggggttgagccgcaatga

SEQ ID NO: 71814 - DNA, 519 bp, Neisseria meningitidis; identical to SEQ ID NO: 39562

SEQ ID NO: 71815 - DNA, 1188 bp, Neisseria meningitidis
atgaataccttactcaagcagctcaaaccctatccctttgcccgactgcacgaggcgatgcagggcatttccgcgcctgaaggcatggaagccgtccccctgcacatcggcgaaccgaaacatccaacaccgaaagtcattacagatgcgctgaccgcctcattgcatgagttggaaaaatatccgctgacggccggtctgcctgaactgcgtcaggcgtgtgcgaactggttaaaacgccgttatgacggcttgacagtggatgcggataatgaaattctgccggttttaggcagtagggaggcgttgttttcttttgttcaaaccgtgttgaaccctgtttcagacggcatcaaacccgcaattgtcagcccgaatcccttttatcagatttacgaaggtgcgacacttttgggcggcggtgaaatccattttgccaattgccccgcgccgtctttcaaccccgattggcgtagtatttccgaagaggtttggaaacgcaccaaactggtgttcgtctgctcgcccaacaaccccagcggcagcgtgctggatttggacggatggaaagaagtttttgatttacaggataaatatggtttcattattgcctcggatgaatgctattccgaaatctatttcgacggcaacaaacctttaggctgcctgcaggccgctgcacagttggggcgaagcaggcaaaaactgcttatgttcaccagtttgtccaagcgttccaacgttccgagcttgcgttccggttttgtcgccggcgatgccgaactgcttaaaaactttctgctttacagaacctatcacggcagtgcaatgagcattcccgtgcagcgcgcaagtattgccgcttgggatgacgaacagcacgttatcgacaaccgccgcctgtatcaggaaaaatttgagcgcgttattcccattttgcaacaggtatttgatgttaaattaccggatgcctcgttttacatctggttgaaagtccccgatggcgacgatttggcatttgcacgcaatttatggcaaaaagccgctatccaagtattgcccggacgctttttggcacgggataccgaacagggcaatcctggggaaggttatgtgcgtattgctttggttgccgatgtcgcaacttgtgtcaaagctgcggaaaccattgtttccctatatcggtaa

SEQ ID NO: 71816 - DNA, 798 bp, Neisseria meningitidis
atgaaccgtctttacccccacccgattatcgcccgtgagggctggccgattattggcggcggtttggctttgagcctgctggtgtcgatgtgttgcggctggtggtctttgccgttttgggtgtttaccgtatttgctttgcagtttttccgcgaccctgcgcgtgagattccgcaaaatcctgaagcggtgttgagtcctgttgacggccgtatcgtggtggtcgagcgcgcacgcgatccgtatcgtgatgtcgatgctttgaaaatcagtatttttatgaacgtgttcaacgtgcattcgcaaaaatcgcctgccgattgtacggtaacgaaagtggcctataacaaaggcaaattcgtgaatgcggatttggacaaagccagcacggaaaacgaacgtaatgcggtgttggcgactacggcttccggtcgtgaaattacttttgttcaagtggccggtttggtggcgcgccgtattttgtgctacacccaagcaggtgcgaaactgtcccgcggcgaacgttatggctttatcctcttcggttcgcgcgtggatatgtatctgcctgtcgatgcgcaggcgcaagtggcgattggcgataaagtaaacggtgtcagcactgtattggcgcgtttgccgctgactgcgccgcaaatcgaatccgagcctgaatctgagcctgctttacaaactgctccggttgaaacagcggcaaacccatctgccgaacaacggcaaatcgaggcagtggcggctaagattcaggcggctgtgcaagatgtgttgaaagattaa

SEQ ID NO: 71817 - DNA, 258 bp, Neisseria meningitidis; identical to SEQ ID NO: 55886

SEQ ID NO: 71818 - DNA, 591 bp, Neisseria meningitidis; identical to SEQ ID NO: 60619

SEQ ID NO: 71819 - DNA, 1644 bp, Neisseria meningitidis; identical to SEQ ID NO: 71507

SEQ ID NO: 71820 - DNA, 1596 bp, Neisseria meningitidis; identical to SEQ ID NO: 55999

SEQ ID NO: 71821 - DNA, 2010 bp, Neisseria meningitidis
ttggctcagcaaggcagctataccaaaacagacggtacaaccgcaaaaatgggggatttacttttagcagccgacaatctgcacagccgcttcaaagacaaagtggaactcactgccgaacaggcaaaagccgccaatcttgcgggcattggtcgtctgcgcgatttgcgcgaagctgccgcattgtccggcgatttggccaatatgctgaaagcttattctgccgccgaaactaaagaagcacagttggcattgttagataatttgattcacaaatgggcggaaaccgattcgaactggggcaaaaaatcgccaatgcgactttcaaccgattggacgcaaacggctaatgaaggtattgcactgacaccatcccaagtagcacaactaaaaaagaacgctttagtttccctttctgataaagctaaagcaactattgacgccgcccgcgaccgcattgccgtgcttgatgcctacacggggcaggattccaacacactctattacatgagcgaggaagatgcgcttaatatcgtcaaagtaaccaacgatacatacgaccatctcgccaaaaacatctaccaaaacctgttattccaaacccgtttgcagccatatttgaatcaaatcagtttcaaaatggaaaatgatacgttcactttggattttagtggtcttgttcaagcatttaaccatgtcaaagaaactaatccgcaaaaagcttttgtggatttggccgagatgcttgcatatggcgaacttcgttcttggtatgaaggccgaagactaatggccgattatgtggaggaggcaaaaaaagcaggtaaatttgaagattaccagaaagtgttgggtcaggagaccgttgcattattagctaaaacatcgggtacgcaagcagatgatatcctgcaaaatgtaggctttggtcataataaaaatgtttctttatatggtaatgacggcaacgacactctgatcggcggtgcaggcaatgattacttggagggcggcagcggttcggatacttatgtcttcggcaaaggcttcggtcaggatacggtctataattacgactacgctaccggacgcaaagacatcatccgctttaccgacggtattacagccgatatgctgacttttacccgagagggcaaccatcttcttatcaaggcaaaagacggcagtggacaagtgactgttcagtcctatttccagaacgatggctcaggtgcttaccgtatcgatgagattcatttcgataacggcaaagtactggatgttgccactgtcaaaaaactggtacagcaatccaccgacggttcggacagattgtatgcctaccaatccggaagtaccttaaatggcggattgggcgatgactatctgtacggtgccgacgggaatgacctgctgaatggtgatgcaggcaacgacagtatctacagtggcaatggcaatgatacgctcaatggaggagaaggcaacgacgccctgtacggctataatggtaacgatgcactgaatggtggcgaaggcaatgatcatttgaacggcgaagacggtaacgacactctgatcggcggtgccggtaatgattacttggagggcggcagcggttcggatacttatgtcttcggcgaaggcttcggtcaggatacggtctataattaccatgtggataaaaactctgacactatgcactttaaaggatttaaagcagcagatgttcattttatccgttccggaagtgatttggtgcttagcgcttctgaacaagacaacgtacgtatttccggattcttctatggtgaaaaccatcgtgtagatacatttgtctttgatgatgcagctatcagtaatccagattttgccaagtatattaatgctggcaataatttggtacagtctatgtctgtgttcggttctaatactgctgcgacaggaggaaatgtggatgccaatacacaatccgtacagcagccgttattggtaacgccatctgcataa

SEQ ID NO: 71822 - DNA, 921 bp, Neisseria meningitidis
atgcctaatccgctttacagacagcacatcatctcgatttcggatttgtcgcgcgaacagttggaatgcctgcttcagacggcattgaagctgaaggcgcatccgcgcggcgatttgttggaaggcaaacttatcggttcgtgcttctttgaaccgtccacgcgcacgaggctgtcgtttgaaacggcggtgcagcggctgggcggcaaggtcatcggcttttccgacggcgcgaataccagtgccaaaaaaggcgagacgcttgccgataccgcccgcatcatttccggctacaccgacgcaatcatccaacgccaccccaaagacggcgcggcgcgcgtggcagcggagttttcgcgcgtccccgtcatcaacgccggcgacggcaccaaccagcaccccagccagaccttgttggatctggtaacgatttatgaaacgcaggggcgtttggacaagctcaaaatcgccatggcgggcgacttgaaatacgggcgcaccgtgcattcgctttgtcaggcgttgaaacgctggggctgcgaatttgcctttgtttcgccgcccagcctcgcgatgcccgactacattaccgaagagttggacgaagccggctgccgataccgtatcctcggcagtttggaagaggcggcggaatgggcggacatcctgtatatgacccgcgtccagcgcgaacgtttcgatgaacaggaatttgccaaaatccaaggcaaattcaacctcgaagcgtctatgctcgcccacgccaaaccgaacctgcgcgtgctgcaccctttgccgcgcgtggacgaaatccatcccgatgtcgatgccacgccgcatgcctattatttcgagcaggcaaccaacggcgtttatgcgcgtatggcgatattgtcgctggtgttgaacgaagaagtgtga

SEQ ID NO: 71823 - DNA, 957 bp, Neisseria meningitidis; identical to SEQ ID NO: 48676

SEQ ID NO: 71824 - DNA, 387 bp, Neisseria meningitidis; identical to SEQ ID NO: 54318

SEQ ID NO: 71825 - DNA, 621 bp, Neisseria meningitidis
atgaattcgaccgcaagtaaaaccctgaaaggattgtcgctggtgtttttcgcctctggattctgcgccctgatttaccaggtcagctggcagaggcttctattcagtcacataggtatcgatttgagttcgattactgtcattatttctgtatttatggtcggcttgggtgtgggtgcgtatttcggtggacgcattgctgaccgttttccttcaagtatcatccccctgttttgcatcgctgaagtatccatcggtctgttcggtttggtaagcaggggtctgatttccggcttggggcatcttttagttgaggctgatttgcccatcatcgctgctgccaatttcctcttattgctgcttcctacctttatgatgggcgcgaccttgcccttgctgacctgtttttttaaccggaaaatacataatgttggcgagtctatcggtaccttatattttttcaacactttgggtgcggcactcggatcgcttgccgccgccgaatttttctacgtcttttttaccctctcccaaaccattgcgctgacagcctgctttaaccttctgattgctgcttcagtatggctgcgttacagaaaggatggatatagtgaacactaa

SEQ ID NO: 71826 - DNA, 1509 bp, Neisseria meningitidis; identical to SEQ ID NO: 54626

SEQ ID NO: 71827 - DNA, 1770 bp, Neisseria meningitidis
atgaccgtacagaccaagacaaaaggtttggcgtggcaagaaaaaccgctatccgacaacgaacgtctgaaaaccgaaagcaattttttacgcggcacgattttggacgatttgaaagacccgctcacgggcggcttcaaaggcgacaacttccaactcatccgcttccacggtatgtatgagcaggacgaccgcgacatccgcgccgaacgcgccgaggcaaaactcgagcccttgaaatttatgcttttgcgctgccggctgccgggcgggatcatcaaaccgtcccaatggatagaactggacaaatttgcccgggaaaacagtcattaccgctccatccggctgaccaaccggcaaaccttccaatttcacggcgtgccgaaagccaagttgcagacgttgcaccgcctcttgcacaaactgggtttggattccatcgccacggcggcggatatgaaccgcaacgtgctttgcacgtccaacccgatcgagtccgaactgcaccaacaggcttacgaatacgcaaaaaaaatttccgaacacctattgccgcgcacgcgcggttatctggatgtatgggtggacggcaaaaaaattcaaagttccgacgacttccttcaagaagacgagccgattttgggcaaaacctatctgccgcgcaaattcaaaaccgcagtcgtcatcccgcccttaaatgatgtggactgctacggcaacgacttggattttgtcgccatttcagacggcaacggacagcttgccggattcaatgttttggcgggcggcgggctttcgatggaacacggcaacaccaaaacctatccgaacatttcactggaactgggtttcgtgcctccggaacacgcgctgaaggccgccgaagcggtggtaaccacgcagcgcgacttcggcaaccgcagcgaccgcaaaaacgcccgcacccgctacaccattcaaaatatgggcttggacaacttccgcgccgaagtcgaacgccgtatgggtatgccgttcgaacccgtacgcccgttcaaatttaccgggcgcggcgaccgtatcggctgggtgaaaggcatagacggcaactggcatttgacccttttcatcgaaagcgggcgtttggttgacgaaggcgggaaacagcttctgaccggcgtgttggaaatcgccaaaatccacaaaggcgacttccgcatcaccgccaaccaaaacctcatcgtggcaaatgtacccgaaggaggcaaagcccggatcgaacagctcgcccgctcatacgggctgatacacgacggtgtcagcaaactgcgcgaaaatgcgatgtcgtgcgtttccttcccgacctgcccgctggcaatggcggaagccgaacgcgtgctgccggacttcatcggcgagctggataagattatggcgaaacacggcacgtcggacgactacatcgttacccgcattaccggctgcccgaacggctgcggacgggcgatgttggcggaaatcggactggtcggcaaagccgtcggacgctacaacctccacatcggcggcgaccgcgaaggcgtacgcatcccccgcctttataaagaaaacatcaccctgcccgaaatccttgccgaattggacgacctgatcggcaaatgggcggcagaacgcaatatcggcgaaggtttcggcgatttcgccatacggacgggcatcgtcaaacccgtattaaatgcacccgttgatttttgggacgcatccaaagccgtcgcgattgcccgcgcctga

SEQ ID NO: 71828 - DNA, 1680 bp, Neisseria meningitidis
atggaaaattttgctcagctgttggaagaaagctttaccctgcaagaaatgaacccgggtgaggtgattaccgctgaagtagtggcaatcgaccaaaacttcgttaccgtaaacgcaggtctgaaatcagaatccctgattgatgtagctgaattcaaaaacgctcaaggcgaaattgaagttaaagtcggcgacttcgttaccgttaccatcgaatccgtcgaaaacggcttcggcgaaaccaaactgtcccgcgaaaaagccaaacgcgctgccgattggattgccctggaagaagccatggaaaacggcaacatcctgtccggcatcatcaacggcaaagtcaaaggcggcctgaccgttatgattagcagcatccgcgcattcctgccgggttctttggtcgacgtacgtcctgtaaaagacacttctcacttcgaaggtaaagaaattgaattcaaagtgatcaaactggacaaaaaacgcaacaacgttgttgtgtcccgccgcgccgttctggaagctaccttgggtgaagaacgcaaagccctgctggaaaacctgcaagaaggctccgtcatcaaaggcatcgttaaaaacattaccgattacggtgcattcgttgacttgggcggcatcgatggtctgctgcacatcaccgacttggcatggcgccgtgtgaaacacccgagcgaagttctggaagtcggtcaagaagtagaagctaaagtcctgaaattcgaccaagacaaacaacgcgtttctctgggtatgaaacaactgggcgaagatccttggagcggcctgacccgtcgttacccgcaaggtacccgcctgttcggtaaagtatccaacctgaccgactacggtgcgttcgttgaaatcgaacaaggcatcgaaggcttggtgcacgtttccgaaatggattggaccaacaaaaatgtacacccgagcaaagttgtacaattgggcgacgaagtcgaagtaatgatcctcgaaatcgatgaaagccgccggcgtatctctttgggtatgaaacaatgccaagccaatccttgggaagagtttgccgccaaccacaacaaaggcgacaaaatctccggcgcggttaaatccattaccgatttcggcgtattcgtcggcctgcccggcggcatcgacggtttggttcacctgtccgacctgtcctggaccgaatccggcgaagaagccgtacgcaaatacaaaaaaggcgaagaagtcgaagccgtcgtattggcaatcgacgtggaaaaagaacgcatctccttgggtatcaaacaactggaaggcgatccgttcggcaacttcatcagcgtgaacgacaaaggttctttggttaaaggttccgtgaaatctgttgacgccaaaggtgctgttatcgccctgtctgacgaagtagaaggctacctgcctgcttccgaatttgcagccgaccgcgttgaagatttgaccaccaaactgaaagaaggcgacgaagttgaagccgtcatcgttaccgttgaccgcaaaaaccgcagcatcaaactttccgttaaagccaaagatgccaaagaaagccgcgaagcactgaactccgtcaatgccgccgccaatgcgaatgccggcaccaccagcttgggcgacctgctgaaagccaaactctccggcgaacaagaataa

SEQ ID NO: 71829 - DNA, 1272 bp, Neisseria meningitidis
atgaatgagggtgaagttgttttaacaccagaacaaatccaaaccttgcgtggttatgctttccgtggcgatacctatggcggttggcgttatttggctaatttgggtgaccgttatgcggatgatgctgctgcaattgtcggtaaggatgcaaacttaaatggtttgaatttatggatgaaaaaaggtgtggaaaacctatgggatgatacggtcggtaaaaagacccgtttagagaaatttgatcgggttgcattgcaacatttcagccaatatgtagatctaattaatgaaaataatggtagattacctaacactagtgaaattgagagaagttactataaagccgttaccgaaaatggtgtttcttctagtgcagctattgatttagttattaatcgctcacttccggatatggcagatggttattgggcattaggtttggggatagaagccgaacgtatccacaatgcgcaagcagtaaataatccgaacggtagcgaatgggataatagaaagcagttaatatctgctttagataaaggatttgatggatcttttaaagagaagcattttacttttttacaatctgtgataatggatgtaacaaagttaggtgttgaatatacaatagatggttggcaaaaaattggaggttggggtaatgggataatcaatgatttatataaaagtgttgcaaaaagagagtggactggaatatttgagatcgttaataataacatcaagcaatttagagatctgttcccaaatccggaaggctggatcgatgatggtcaccaatgtttcgctccttgggttaaagaaactaaaaaacgcaatggcaaatatcatgtctacgaccccctcgccctagatttggacggagacggtatagaaaccgttgccaccaaaggctttgcaggcagcttatttgatcacaccaacaacggtatccgcaccgccaccggttgggtttctgccgatgacggtttactcgtccgcgatttgaacggcaacggcatcatcgacaacggtgcggaactcttcggcgacaacaccaaactggcagacggttcttttgccaaacacggctacgcggctttggccgaattggatcaaacggcgacaacatcatcaacgcggcagacgccgcattccaaaccctgcgtgtatggcaggatctcaatcaggacggcatttcccaagctaatgaattgcgtacccttgaagaattgggtattcaatctttggatctcgcctataaagatgtaa

SEQ ID NO: 71830 - DNA, 1329 bp, Neisseria meningitidis; identical to SEQ ID NO: 55368

SEQ ID NO: 71831 - DNA, 1224 bp, Neisseria meningitidis; identical to SEQ ID NO: 55261

SEQ ID NO: 71832 - DNA, 171 bp, Neisseria meningitidis; identical to SEQ ID NO: 54459

SEQ ID NO: 71833 - DNA, 612 bp, Neisseria meningitidis; identical to SEQ ID NO: 36530

SEQ ID NO: 71834 - DNA, 483 bp, Neisseria meningitidis; identical to SEQ ID NO: 40363

SEQ ID NO: 71835 - DNA, 531 bp, Neisseria meningitidis; identical to SEQ ID NO: 39309

SEQ ID NO: 71836 - DNA, 915 bp, Neisseria meningitidis
  misc_feature 900, 901, 902, 903, 904: 'n' is a, c, g or t
atggacacactgacccgattcctccccgaacacctgcaacaaaaccagctgcccgaagcactcggcggcgttttactgtccgttgtttccgcctgcaccgaaatcaacgccaaagtccgcctcggcgcactggccggcgtattgggtatggcgggcacgggcaatattcagggcgaagaccaaaaaaaactggatgttatcgccaacaacatcatgattgacacactcaaagccaaccctgccgttgccggtttggcaagcgaggaagaagactctttcgtaagtgccggtgaaaacggacgctatctcgtcctattcgaccctttagacggatcgtccaatattgatgtcaacatttccgtcggtacaattttctccatccttgaaaaacccgaaggcgcattggcaaccgaatcattccttcaaacgggcagacagcagcttgccgcaggctatatcctctacgggcctcaaacccagctcgtattcacattcggacacggcgtatatatgttcacgctcaatgccgaaaacgaatttgtgctgaccaaagaaaaaccgaaagtacccgaaagtaccaaagaatttgccatcaatatgtccaaccgccgccactggctgccccccgtccaacaatacatcgacgagctcttggcgggcgaaaccggcacgcgcggcaaaaactacaatatgcgctgggtagccagcatggttgccgaaatccaccgcatcctgatgcgcggcggcgtgttcatgtatccgcaagacaaacgcgacccgtccaaacccggcaaactgcgcctgatgtacgaagccaaccctatgagcctgatactcgaacaggcgggcgcatcggcaagcaacgcatatcaagccatgctcgacatacagcccgaaaannnnncacacacttaa

SEQ ID NO: 71837 - DNA, 954 bp, Neisseria meningitidis; identical to SEQ ID NO: 47463

SEQ ID NO: 71838 - DNA, 816 bp, Neisseria meningitidis; identical to SEQ ID NO: 61191

SEQ ID NO: 71839 - DNA, 1788 bp, Neisseria meningitidis; identical to SEQ ID NO: 54586

SEQ ID NO: 71840 - DNA, 1143 bp, Neisseria meningitidis; identical to SEQ ID NO: 51127

SEQ ID NO: 71841 - DNA, 624 bp, Neisseria meningitidis; identical to SEQ ID NO: 62065

SEQ ID NO: 71842 - DNA, 327 bp, Neisseria meningitidis; identical to SEQ ID NO: 39180

SEQ ID NO: 71843 - DNA, 999 bp, Neisseria meningitidis; identical to SEQ ID NO: 55281

SEQ ID NO: 71844 - DNA, 201 bp, Neisseria meningitidis; identical to SEQ ID NO: 37363

SEQ ID NO: 71845 - DNA, 1815 bp, Neisseria meningitidis; identical to SEQ ID NO: 55820

SEQ ID NO: 71846 - DNA, 1041 bp, Neisseria meningitidis
atgcaacccatccgataccgaaccgacctcaccccctacaacaccttcggtcttcgcgcccaagcccaagcctttatcgcgctcgaacacgccgacgagttgcacgacatcgtccgactgcccgagttcgaccgcgataccgttttatggctaggcggcggcagcaatatccttttgatgcaggattacgccggactggtcgtacacatggaaaacaaaggcatacgcgagattgtgcgttcagacggcatggttctgattgaagcgcaggcgggcgaaatctggcacgattttgtcctgcacaccgtcgcgctgggcttgaatgggctggaaaacctgagcctgattccgggtacggtcggcgcgtcgcccgtgcagaacatcggcgcatacggcgtagagacgaaagatgtgattcacagcgtgcgctgcttcgatttggatacggaaacctttgtaaccctttccaatgccgactgccgcttcgcctaccgcgaaagcctgttcaagcaggaaggtaaagggcgttatgtgattgtttcggtcgtatttgcattaaaaacgcattttgtgccgaacttggattacggcgatttggcggccgccgttgccgaactgagcgcgggcagggtgccgacggcgaaagatgtttccgatgcagtgtgtgcaatccgcaacagtaaacttcctaatcctaacgtgcttggtaatgtcggcagtttctttaaaaatcccgtcatcggcgcggaaaaagctgccgccctgttggagcagcatcccgatatgccgcattatccgcagccggacggttcggtcaaactcgccgccggctggctgatcgaccaatgtcgtctgaaaggcttccaaatcggcggcgcggcggtacatgacaggcaggctttggtcttagtgaacaaaaacaacgcctcggcaaacgatgtccggcagttggcgcaacacatcaaatttacagtatttgctcggtttcaggtagaattgcacgccgaacccaattggctgcctgcttcgttcagcctgtaa

SEQ ID NO: 71847 - DNA, 321 bp, Neisseria meningitidis; identical to SEQ ID NO: 37031

SEQ ID NO: 71848 - DNA, 1644 bp, Neisseria meningitidis
atgaatgcttttacccgtgcatggtatgcgctcgaacgccattatcaggatacgcgtcatgtccttttgcgcgaccgctttgcctgcgaacccgaccgttttgagcgtatgcatgagcgtttggacgggatgttgttcgattacagcaaaaaccgtttgggcgaagatacgctgcaactgctctgccgtcttgcggagacggcggatttggaagggaaaatgcgtgctttgcggacgggtgcgaaagtcaacggcagcgaggggcgtgccgcgctgcatacggctttgcgcctacccgacggtgcggatgccgtttatgcggacggcagggacgtgttgcccgaaatccgccgcgagttaaatcgtgcgttggagtttgcacacagtttggacgacggttcgtatcaggggacaaccggaaaacggattacggattttgtccacatcggcataggcggatccgacctcgggccggcaatgtgcgtgcaggcacttgagccgttcagacggcatatcaccgtccattttgccgccaacgccgatcctgcctgcctggatgcggttttatgccgtctgaaccccgaaacgacagtgttttgcgttgccagcaagtccttcaaaacaccggaaaccctgctcaatgcacaggcagtcaaggcgtggtatcgcggtgcggggttctcggaatccgaaacggcgtgccatttttgcgcggtgtctgccgacactgcggcagctgcggcttttggtatcgcggcggaacgcgtgtttgcgatgtacgactgggtgggcggacgctattccgtctggtcgcccgtcggtttgcccgtgatggttgcggtcggcggggcgcgtttccgcgagttgttggcgggggcgcacgcgatggacagccattttttccacacgccgccgcgccgcaacattcccgttctgatggcactgattgccgtgtggtataacaatttccaacacgcggacgggcagaccgccgttccgtacagccacaacctgcgcctgctgccggtgtggctgaaccagctcgatatggagagtttgggcaaaagccgcgcttcagacggcagtcccgccgtgtgcaaaacgggcggcatcgtgttcggcggtgaaggggtcaactgccagcacgcctatttccaactgctccaccaaggcacgcgcctaattccctgcgactttatcgtcccggtgacggcgcagggcgtggaggacggacgcagccgttttaccgttgccaacgcctttgcccaagcggaagccctgatgaagggcaaaaccttggacgaagcacgcgccgaactggcagatttgcccgaagcggaacgcgaacgccttgcgccgcacaaagagttccctggcaaccgccccagcaacagcatcctgctcgaccgcctcacgccctacaatttgggtatgctgatggcggcttacgaacacaaaaccttcgtccaaggcgcgatatggaacgtcaaccccttcgatcagtggggggttgagtacggcaaacagttggcgaaaaccatcatcggcgaactggaaggcggcacgtccgtacacgatgcctcgaccgaagggctgatggcgttttaccgcgaatgccgtctgaaaggcggcggcgcggcataa

SEQ ID NO: 71849 - DNA, 681 bp, Neisseria meningitidis; identical to SEQ ID NO: 71598

SEQ ID NO: 71850 - DNA, 1194 bp, Neisseria meningitidis; identical to SEQ ID NO: 54515

SEQ ID NO: 71851 - DNA, 603 bp, Neisseria meningitidis; identical to SEQ ID NO: 55351

SEQ ID NO: 71852 - DNA, 1029 bp, Neisseria meningitidis
atgaaacagacagtcaaatggcttgcagccgccctgattgccttgggcttgaaccaagcggtgtgggcggatgacgtatcggattttcgggaaaacttgcaggcggcagagcagggagatgcagcagcccaatacaatttgggcgcaatgtattacaaaggacgcggcgtgcgccaagatgataccgaagcggtcagatggtatcggcaggcggcagcgcaggggtttgccccagcccaagctttgttgggcagtatgtatgccatcggacaaggcgtgcgccaagacgatgccgaagcggtcaaatggtatcggcaggcggcggagcagggggatgcccaagcccaagttttgttgggcgtgatgtatgacaaaggcgaaggagttcgtcaagatgatgcacaggcaatgcagaggtttcgcaaggctgcagaacaaggggatgccgcagcccaacataatttgggtctgatgtatctcacaggcgaaggagtccgtcaagactatgcagaggcaatgcagtggtttcgcaaggctgcagaacaagggattgccgaagcccaatacaatttgggtgtgatgtatcacaaaggcgcaggagtccgtcaagactatgcacaggcagtgcagtggtttcgcaaggctgcggagcgagggaaggcagaagcccaacataatttgggtctgatgtatctcacaggcgaaggagtccgtcgggattctaaacaggcagcgcagtggtttcgcaaggctgcagaacaagggattgtccaagcccaacataatttgggtataaggtattacaaaggcgaaggagttcgtcgggattataaacaggcagcgcagtggtatcgtagggctgcagaacaaggggatgccgtagcccaacataatttgggtctgatgtatctcaaaggggaaggcgtgcgccaagaccgcgcccttgcacaagaatggcttggcaaggcgtgtcaaaacggaaaccaagacggctgcgacaatgaccaacgcctgaaagcgggttattga

SEQ ID NO: 71853 - DNA, 387 bp, Neisseria meningitidis; identical to SEQ ID NO: 55415

SEQ ID NO: 71854 - DNA, 279 bp, Neisseria meningitidis
  misc_feature 264, 265, 266, 267, 268: 'n' is a, c, g or t
atgaaaaatcaaaaaaatttcgataaaatgcttgaggcgcggcagcgttttgatttagaatctccccaatatttttatcttcagacggcatttcatcatgcaaggcaaaaaatttacaaccgcttattgctattggtaccacacagacgtgcggtacttttttgcgcttgcttgaaatccatcccatacgcaaaacaggccgctcgaaaatggggcggcttttttgttaccttcacacaggtcgcccgattcggcaacacacgnnnnncacacacttaa

SEQ ID NO: 71855 - DNA, 246 bp, Neisseria meningitidis; identical to SEQ ID NO: 59399

SEQ ID NO: 71856 - DNA, 1176 bp, Neisseria meningitidis; identical to SEQ ID NO: 61066

SEQ ID NO: 71857 - DNA, 1008 bp, Neisseria meningitidis
atgagcaccttcttccagcaaaccgcccaagccatgattgccaaacacatcgaccgtttcccgctattgaagttggatcaggtaattgattggcagccgatcgaacagtacctgaaccgtcaaaaaacccgttacctcagagaccaccgcggccgtcctgcctatcccctgttgtccatgttcaaagccgtcctgctcggacaatggcacagcctctccgatcccgaactcgaacacagcctcatcacccgcatcgatttcaacctgttttgccgttttgacgaactaagcatccccgattacagcaccttatgccgttaccgcaaccggctggcgcaagacgacaccctgtccgaattgctcaaactgattaaccgacaactgaccgaaaaaggcttaaaagtagagaaagcatccgccgccgtcattgacgccaccattattcagaccgccggcagcaaacagcgtcaggccatagaagttgacgaagaaggacaaatcagcggccaaaccacaccgagtaaggacagcgatgcccgttggataaagaaaaacggcctctacaaactcggttacaaacaacatacccgtaccgatgcggaaggctatatcgagaaactgcacatcacccccgccaatgcccatgagtgcaaacacctgccgccgttgttagaagggatagctgaaggtacgaccgtctatgccgacaaaggctatgacagtgcggaaaaccggcaacatctggaagaacatcagttgcaggacggcattatgcgcaaagcctgccgcaaccgtccgctgacggaaacgcaaaccaaacgcaaccggtatttgtcgaagacccgttatgtggtcgaacaaagcttcggtacgctgcaccgtaaattccgctatgcgcgggcagcctatttcgggctgattaaagtgagtgcgcaaagccatctgaaggcgatgtgtttgaacctgttgaaagccgccaacaggctaagtgcgcccgctgccgcctaa

SEQ ID NO: 71858 - DNA, 486 bp, Neisseria meningitidis
atggacgcgctgcacaccatcgcccgaaacctgacgaaaaaacgtcaaaccgtaagctgtgccgaatcctgtacgggcggaatgcttgccgccgcattcacaagcgttgcaggcagttcgcaatggttcgaccagagttttgtaacatacagcaacaaagccaaagaagaccgcttgggcgtgttgcccgaaaccctgctcgaacacggcgcggtcagccgccaaaccgtctatgagatggcgcgcggcgcgaaagccgtggcgcaggcggattacgccgtcggtatttccggcatcgccggaccgggcggcggcagcgaaagcaaacccgtcggcacagtttggttcgggtttgcctttccgggcggaagttgcgaagcaatgcgccgttttgatggcaaccgcgaatccgtccgcgcgcaggcggtcgccttcgcgttggaacggttggcggggctgattgaaaacggcggcgatgccgtctaa

SEQ ID NO: 71859 - DNA, 747 bp, Neisseria meningitidis; identical to SEQ ID NO: 61543

SEQ ID NO: 71860 - DNA, 522 bp, Neisseria meningitidis; identical to SEQ ID NO: 55550

SEQ ID NO: 71861 - DNA, 612 bp, Neisseria meningitidis
atgattacgacttataaaaccattacttccccgacgcaggctgggtttaaagataaaggcagccgttttatcgcatttgcctatccgattcggacattggctgatgtgaaaaaatacctcgatccgttaaaggaagagcaccataaagcacgacactggtgttatgcctatcgtttgggcgtggatggtatgcaatttcgtgccaacgatgatggagagccatcaggaagtgctggacgaccaattttgggacagattgattcggtgggcatcaccgatgttttggtcgtggtcgtccgctatttcggtggtactttattgggcgtttcaggtctgatacatgcgtacaaagaggcgacggctcaggcgttggcgattgcggaagtgattgaaaagaatattgaaaaaaccgtttggctgaaatgtgaatatccatttttgaatgaagcgatacgcatcgccaaacaatatcaggcggatatattggagcgggatttgcagttggattgccgattgacggtaagtttgtcgttggcaaattatgaagtctgtgttgcggcttggaagaatacacggcagattgaagtaaatacggaaaagccttttgaatga

SEQ ID NO: 71862 - DNA, 480 bp, Neisseria meningitidis
atgagtaaacacacttatccgataacacctgccgtacgcgttttgcgtgaaaacggcatcgaatttgaaccttttacctatgcctatgaggaacacggcggcacggcgcagttttcccgactgttcggcaaagacgaacacttggtcattaaaaccattgttttgcaagatgaaaacggtaaggggctgattgtcttgatgcacggcgacaaacagatttccacgcgcaatctggctcggcatttgggtgcgaaacacatcgaacccgctacgcccgcacaggcaaacaagtggacgggctatctggtcggcggcacaacgccgttcggcatccggacaaagttggatatttacgtcgaacagtcggtgatggatttggaaaccatctatatcaacggcggaaaacgcgggttcattatcggcatccgtcccagagatttaaatattttgaacccgaaaacaatacaggcggcggtttga

SEQ ID NO: 71863 - DNA, 960 bp, Neisseria meningitidis
atgagcaccttcttccggcaaaccgcacaagccatgattgccaaacacatcgaccgtttcccgctattgaagttggaccaggtaattgattggcagccgatcgaacaatacctgaaccgtcaaagaacccgttacctccgagaccaccgcggccgtcctgcctatcccctgttgtccatgttcaaagccgtcctgctcggacaatggcacagcctctccgatcccgaactcgaacacagcctcatcacccgcatcgatttcaacctgttttgccgttttgacgaactaagcatccccgattacagcaccttatgccgttaccgcaaccggctggcgcaagacgacaccctgtccgaattgctcaaactgatcaaccgacaactgaccgaaaaaggcctaaaagtagagaaagcatccgccgccgttgttgacgccaccattattcagaccgccgacagcaaacagcgccaggctatagaagtcgatgaagaaggacaaatcaacggccaaaccacaccgagtaaggacagcgatgcccgttggataaagaaaaacggcctctacaaactcggttacaaacaacatacccgtaccgatgcggaaggctatatcgagaaactgcacatcacccccgccaatgcccatgagtgcaaacacctgtcgcctttgctggaaggactgcccaaaggtacgaccgtctatgccgacaaaggctacgacagtgcggaaaaccggcaacatctggaagaacatcagttgttagacggcattatgcgcaaagcctgccgcaaccgtccgctgacggaaacgcaaaccaaacgcaaccggtatttgtcgaagacccgttatgtggtcgaacagagcttcggtacgctgcaccgtaaattccgctatgcgcgggcagcctatttcggactgatttgcgcccgctgccgcctaaaaggcagcccggatgcctga

SEQ ID NO: 71864 - DNA, 264 bp, Neisseria meningitidis; identical to SEQ ID NO: 39198

SEQ ID NO: 71865 - DNA, 1287 bp, Neisseria meningitidis
atgagcgcaatcgttgatattttcgcccgcgaaattttggactcacgcggcaaccccacagtcgagtgtgatgtattgctcgaatccggcgtaatgggacgcgcagccgtaccgagcggcgcgtccaccggtcaaaaagaggctttggaacttcgcgacggcgacaaatcccgttattcgggcaagggcgtattgaaggcggtcgaacacgtcaacaaccaaatcgcccaagccctcattggtatcgatgccaacgagcaatcttatatcgaccaaatcatgatcgaattggacggtactgaaaacaaaggcaatttgggtgcgaatgcgactttggcggtttctatggcggttgcacgcgccgctgccgaagactcaggcctgccgctttaccgctacttgggcggcgcaggcccgatgtccctgcccgtaccgatgatgaacgtcatcaacggcggcgaacacgccaacaacagcctgaacatccaagagtttatgattatgcccgtcggcgcaaaatctttccgcgaagcgttgcgctgcggtgcggaaattttccacgccttgaaaaaactgtgtgacagcaaaggcttcccgaccacagtcggcgacgaaggcggtttcgcccccaacctgaacagccacaaagaagccctgcaactgatggttgaagccaccgaagccgccggctacaaagcgggcgaagacgtattattcgcattggactgcgcgtccagcgagttctacaaagacggcaaataccacttggaagccgaaggccgctcctacaccaacgcggaatttgccgaatatctggaaggcctggtcaacgagttccccatcatctccatcgaagacgggatggatgaaaacgactgggaaggctggaaactgctgaccgaaaaactgggcggcaaagtccaactcgttggcgacgacctcttcgttaccaacccgaaaatccttgccgaaggcattgaaaaaggcgtggcaaacgcactattggtcaaagtcaaccaaatcggtactttgagtgaaaccctgaaagccgtcgacttagccaaacgcaaccgctacgccagcgtaatgagccaccgctccggcgaaaccgaagacagcaccattgccgacttggcagtcgccaccaactgtatgcagatcaaaaccggttctttgagccgttccgaccgcatggcgaaatacaaccaactgctgcgtatcgaggaagaattggcggaagccgccgactaccccagcaaagccgcattctaccaactgggcaaataa

SEQ ID NO: 71866 - DNA, 210 bp, Neisseria meningitidis; identical to SEQ ID NO: 37799

SEQ ID NO: 71867 - DNA, 1050 bp, Neisseria meningitidis
  misc_feature 6, 7, 8, 9, 10, 1027, 1028, 1029, 1030, 1031: 'n' is a, c, g or t
gtgtgnnnnnaactgcccgtacgcgttatcgcccaaacagccaaaacccgttcaggctgggataccgtgctcgaaggtaccgaattcaaaaccacgctggccggtgccgacattcaggcaggtgtaggcgaaaaagcccgtgtcgatgcgaaaattatcctcaaaggcattgtgaaccgtatccagtcggaagaaaaattagaaaccaactcaaccgtatggcagaaacaggccggacgcggcagcactatcgaaacgctaaaactgcccagcttcgaaagccctactccgcccaaattgtccgcacccggcggctatatcgtcgacattccgaaaggcaatctgaaaaccgaaatcgaaaagctgtccaaacagcccgagtatgcctatctgaaacagctccaagtagcgaaaaacatcaactggaatcaggtgcagcttgcttacgacagatgggactacaaacaggagggcttaaccgaagcaggtgcggcgattatcgcactggccgttaccgtggtcacctcaggcgcaggaaccggagccgtattgggattaaacggtgcggccgccgccgcaaccgatgcagcattcgcctctttggccagccaggcttccgtatcgttcatcaacaacaaaggcgatgtcggcaaaaccctgaaagagctgggcagaagcagcacggtgaaaaatctggtggttgccgccgctaccgcaggcgtagccgacaaaatcggcgcttcggcactgaacaatgtcagcgataagcagtggatcaacaacctgaccgtcaacctagccaatgcgggcagtgccgcactgattaataccgctgtcaacggcggcagcctgaaagacaatctggaagcgaatatccttgcggctttggtcaataccgcgcatggagaagcagccagtaaaatcaaacagttggatcagcactacatagtccacaagattgcccatgccatagcgggctgtgcggcagcggcggcgaataagggcaagtgtcaggatggtgcgatannnnncacacacttaattaattaa

SEQ ID NO: 71868 - DNA, 195 bp, Neisseria meningitidis
ttggaatctcatgatttggcagaaggatatacttatttcttcaatgaaaatacggatgattgctatgttttgaaagaggattttattaataatgagcgatatgaaaaaacagaattatatccccaaaaagataaggtaattctatttccaaagtttggtgaatatgatttggtgttaaatccggacattatttaa

SEQ ID NO: 71869 - DNA, 423 bp, Neisseria meningitidis; identical to SEQ ID NO: 54238

SEQ ID NO: 71870 - DNA, 582 bp, Neisseria meningitidis
atgaaacacactgtatccgcatcggtcatcctgcttttgaccgcttgcgcgcaattacctcaaaataacgaaaacctgtggcagccgtccgaacacatcagcagttttgcagcagaagggcggttggcagtgaaagcggaagggaaaggttcgtatgcaaatttcgattggacataccaaccgcccgtggaaaccatcaatatcaacacccctttgggcagtacgctcgggcagttgtgtcaagacagggacggcgcattggcagtggacggcaaaggaaatgtctatcaggcggaaagtgcggaagaattaagcaggcagctggtcggtttcaaactgccaatccaatatctgcatatctgggcagatggcaggcgtgtggcgggcgcgccttaccgcatcctgccggacggcatattggaacaatacggttggactgtcggcagaaccgccgacagtggggggcaagtccgaacgttgcaactgaataacggaaatttgaacatcaggctggttttcaccgaaatcggtatgccgtctgaaaccgaaaccccggaacgctgtgcggcgcgcacgagataa

SEQ ID NO: 71871 - DNA, 675 bp, Neisseria meningitidis; identical to SEQ ID NO: 54660

SEQ ID NO: 71872 - DNA, 738 bp, Neisseria meningitidis
atgctgctgatacccgccatcgatttgaaagaaggacgctgcgtccgcctgaaacaagggctgatggaagaggcgaccgtcttttccgattcgcccgccgaaaccgcgctgcactggttcaaacaaggcgcgcgccgcctgcatctggtagatttgaacggcgcgtttgccggcgttccgcaaaacctgcccgccatcaaagacatccttgccgctgtcgccaaagacatccccgtacagctcggcggcggcatacgcgatttgaaaaccatcggacaatatttggatttgggcttaaacgacgtgattatcggcacggcggcggtcaaaaaccccgacttcgtgcgcgaggcgtgcaaagccttccccggcaggattattgtcgggctggatgccaaagacggtatggccgccatcgacggctgggcaaccgtaaccgggcatcatgtaattgatttggcaaaacgctttgaagacgacggcgtcaacagcatcatctacaccgacatcgggcgcgacggtatgatgagcggcgtgaacatcgacgcgacggtcaaactcgcccaagccgtccgcattcccgtcatcgcctccggcggactgaccggcttggacgacatccgcgccctgtgtgccgccgaaaaacatggcgtagcaggcgcgattaccggccgcgcgatttacgagggcagcatcgattttgcccaagcgcagcaactggcagattccctcgactaa

SEQ ID NO: 71873 - DNA, 783 bp, Neisseria meningitidis; identical to SEQ ID NO: 51887

SEQ ID NO: 71874 - DNA, 324 bp, Neisseria meningitidis; identical to SEQ ID NO: 37053

SEQ ID NO: 71875 - DNA, 657 bp, Neisseria meningitidis
atgaacagacaaaaagtcatcgccatcgacggcccgggcgcatcgggcaaaggcacggttgccgcccgcgttgccgccgcattgggatacgattatctcgataccggcgcactctaccgcctgactgccctatatgcacaaaaacaaggcgtgggatggcacgatgaagaaaacgtttccgaactggcaaaaaaactgcccgccgtattttcaggcagccgcatcctgctcggcggcgaagacgtttcagacggcatccggacagaagccatcggcatgggcgcatccgcagtcgcacagttgcctaaagtccgcgcctccctgctgcaacgccaacgcgattttctgaccgaaaaaggactggtcgccgacggacgggacaccggatcggtcgtcttcccccaagccgaacttaaaatcttcctgacggcagaatccaaaatccgtgccgaacgccgcgccaaacaaatcggcatcccctgcgaaggtttggcattcgagcgcatcctgtccgacatcgaagccagagacgaggcagaccgaaaccgcaaagttgcccccctgaaacaacagcccgatgccctgcttttggacacaagccgcctgactatagaagaaactgtaaaaaaagtgcttgattggtatcgtgaagtttaa

SEQ ID NO: 71876 - DNA, 768 bp, Neisseria meningitidis; identical to SEQ ID NO: 61061

SEQ ID NO: 71877 - DNA, 885 bp, Neisseria meningitidis
atgagcaccttcttccagcaaaccgcccaagccatgattgccaaacacatcgaccgtttcccgctattgaagttggaccaggtgattgattggcagccgatcgaacaatacctgaaccgtcaaaaaaaccgttaccttagagaccaccgcggccgtcccgcctaccctctgctgtccatgttcaaagccgtcctgctcggacaatggcacagcctctccgatcccgaactcgaacacagcctcatcacccgcatcgatttcaacctgttttgccgtttcgacgaactgatcatccccgattacagtaccttatgccgctaccgcaactggctggcgcaagacgacaccctgtccgaattactcaaactgattaactgccaactgaccgaaaaaggcctaaaaatagagaaagcatccgccgccgtcgttgatgccaccattatccagaccgccggcagcaaacagcgtcaggccatagaagttgacgaagaaggacaaatcagcggtcaaaccacaccgagtaaggacagcgatgcccgttggataaagaaaaacggcctctacaaactcggttacaaacaacatacccgtaccgatgcagaaggctatatcgagaaactgcacattactcccgccaatgcccatgagtgcaaacacctgtcgccgttgttggaagggttacccgaaggtacgaccgtctatgccgacaaaggctacgacagtgcggaaaaccgaacatctggaagaacatcagttgttagacggcattatgcgcgggcagcctatttcggactgattaaagtgagtgcgcaaagccacctgaaggcgatgtgtttgaacctgttgaaagcggccaacaggctaagtgcgcccgctgccgcctaa

SEQ ID NO: 71878 - DNA, 318 bp, Neisseria meningitidis; identical to SEQ ID NO: 54811

SEQ ID NO: 71879 - DNA, 126 bp, Neisseria meningitidis; identical to SEQ ID NO: 54224

SEQ ID NO: 71880 - DNA, 810 bp, Neisseria meningitidis; identical to SEQ ID NO: 70987

SEQ ID NO: 71881 - DNA, 1302 bp, Neisseria meningitidis
atgccgtctgaaaccgcccgccccctttatgcggacacgcgcgccgcacacacgctcgtctggttccgccaaaacctccgcatccgcgacaacgccgccttatgcgccgccgttgccgaaggtttgcccgttatcggtatttggattgacgatgccgaaacagacaaccctcgccgcgccgcgttctaccgccaatccgccgccgaactcgcccaagggcttgcagggcgcggcatcccgctctacacggcggcatcgcctgccgagctcgtccggctcgccgtccgcctcaatatccgcgccgtcatcgccgacgaatcccatacttttgccgacaaactcgccgacaacgccctttggcatgaattggacaaacacggcatcgcgttaaccttcgtcaacgaccgtgccgttttcggcaaaaccgacctgatacccgacggcggcacggcacacaccgatttcgaccgctaccgcgaagtatggctcgaccgcttttccaagcagccccccgccggtccggacctattcgtggcataccgccaacccttccccgaaaacctttccgccccgccgcctgccgccctttcagacggcatcttcctgccgcaaaacagcggcgaaacggcggcttggcggcagtggcggcggtttctcgaacaggcggattcctactccgttttaaaggatttcccctcgcgcaaacacacttcgctgatgggcgcgtatttgagtgccggctgcatctcgccgcgcctgctcgcgcgggaaagcctcgaacgccgtctgaacgcgtgggcggacaacatcatccgccgcgattttttccttcaacttgccttgcagcacacggatgacgacccttcagacggcaatcctgaacacaccctgcgcctgacgctttggcagcagggccggaccggcattccgattatcgatgccgcgatgcgctgtttgcacaaaaccggcagcctccaccccgccctgagacgcttgagcgcggattttttctgccacgttttaaacctcccccgccgcgaaggcgagatatggtttgcccggcagctgaccgatttcgatgcggcaatcaaccaaggcaactggtggcttgccgcctcacggcacacctgccccgacattgccgccgccgcacacaaaaccgaccccgacggcacctttgtcagacggcacattcccgagcttgcccacctgtccgccgacaccgtccacacgccttggcggtttgcctgttcggtcgatacccacggctatcccgcccatcctgtcgccggtattccctaa

SEQ ID NO: 71882 - DNA, 672 bp, Neisseria meningitidis
atgactttttccgcgattctgttctatatccttgccgccatcgttttgtacggtgcggttcgtaccgttaccgcgaaaaaccctgttcacgccgctttgcatctggtgctgaccttctgcgtgagcgcgatgctttggatgctgatgcaggctgagtttttgggcgtgacgctggtggtggtttatgtcggcgccgtgatggtgttgttcctgttcgttgtgatgatgttgaacatcgacattgaagaaatgcgcgccggtttctggcgtcatgcgccggttgccggtgtggtcggcacattgttggcagttgccctgattctgattctggtcaacccgaaaaccgaccttgccgcatttggtctgatgaaagacattcctgccgattacaacaatatccgcgatttgggcagccgtatttataccgactacctgttgccgtttgaattggcggcggtattgctgctgttgggtatggtggcctcgattgcattggttcaccgtaaaaccaccaatccgaaacgtatggatcctgccgaccaagttaaagtacgcgccgatcaaggccgtatgcgtctggtgaaaatggaagcggtcaaaccgcaagtcgaatctgccgaagaaagcgaagtttcagacggcctcaagccggaaggggagggcaaagcatga

SEQ ID NO: 71883 - DNA, 753 bp, Neisseria meningitidis; identical to SEQ ID NO: 38815

SEQ ID NO: 71884 - DNA, 606 bp, Neisseria meningitidis; identical to SEQ ID NO: 37272

SEQ ID NO: 71885 - DNA, 1098 bp, Neisseria meningitidis
  misc_feature 8, 9, 10, 11, 12: 'n' is a, c, g or t
gtgtgtgnnnnncgacgcgacagcctgctcaagccgctgcaagccgttaccggcatcgtcgaacgccgccacaccctgcccatcctgtccaacgtcctgattgagggaaaaggcggtcagaccaaactcttggcaaccgatttggaaatccaaatcgacactgcgggtcccgagggcggcgcgggcgacttccgcatcactaccaatgccaagaaatttcaggacattttgcgcgcgctgcctgccggtgcgctggtgtcgctggattgggacgacagccgtctgacgctgaaggcgggcaaatcgcgttttgccctgcagaccctgcctgccgccgattttccgatgatgaatgtcggcgaggacatcagcgcgactttctcgctggagcaggagcgtttcaaaaccatgctgtcgcaagtgcagtacagcatggcggtgcaggacatccgctattatctcaacggtctgctgatgcaggttgagggcagccagttgcgccttgtggcgaccgacggacaccgccttgcctatgcagcctgcgcgattgatgcggatttgccgcacgccgaagtgattttgccgcgcaaaacggtgctggaactgttcaaactgttgaacaaccccgacgatccgattcaaatcgagctgctggacaaacaggtgcgtttccaatgcaacggcacgaccatcgtcagcaaggtcatcgacggcaaattccccgatttcaaccgcgtgattcctttggacaacgacaagattttcgttttgtcccgtgccgaacttttgggtgcgctggaacgtgtgtccattcttgccaacgaaaaattccgtggcgcgcgcctgttcctgcaatccggcctgttgagcgtcgtgtgcagcaacaacgagcaggaagaagcgcgcgaagaaatcgaaatcgcctatcagggtggcgaactcgaagtcggtttcaatatcggctatctgatggacgtgttgcgcaacatccattccgacgatatgcagcttgccttcggcgatgccaaccgctcgacgctgtttaccgtgccgaacaatccgaatttcaaatatattgtgatgccgatgcggatttga

SEQ ID NO: 71886 - DNA, 846 bp, Neisseria meningitidis
atgaatattgcggacggacggcaggcgtttcccgcacctgcaaaactgaatctcgatttgaggattaccggcaggcgggaagacggttatcacaatatcgaaagcatattctgcctgatagatttgcaggataccgtatatttgaaaccgagggacgacggcaaaatcatcctgcacaatcctgtcggcggaatagcgcaggaggccgatttgagctaccgtgccgcatcgttgctgcaaaaatatgcgcgcaaccccgccggcgtggaaatatggctggacaaaaaaatcccgacaggggcgggtttgggcggcggaagctcggatgcggcaaccgttttgctggtgttgaaccgttggtggcagtgcggtctgacgcagcggcagctcattgattcgggcgcggctctgggggcggacgtaccgttttttattttcggcaaaaatgcgtttgcgcggggtataggcgacaggctggacgaaatggatattccgaaacagtggtatgtcatcgtcaaaccgcccgtccacgtttccactgcaaaaattttcacacacgaaggcttgacacgaaattccgcctcaagcataatgccgactttccaaaacctgcaaccgtttagaaatgatatgcaggcagttgtatttaaagaataccctgaagtttggaaagcctattccgagttgtcccgatatggatttgccttaatgacaggttctggtgcgtgtgtattcacggcgtgtcaagataggaatagcgcatacaatatataccgacaagtttcagatttgtacgaggcatatttggcagagggtctttcaaaacatccttggttgtccgtataa

SEQ ID NO: 71887 - DNA, 771 bp, Neisseria meningitidis; identical to SEQ ID NO: 55435

SEQ ID NO: 71888 - DNA, 174 bp, Neisseria meningitidis; identical to SEQ ID NO: 42248

SEQ ID NO: 71889 - DNA, 903 bp, Neisseria meningitidis; identical to SEQ ID NO: 55357

SEQ ID NO: 71890 - DNA, 825 bp, Neisseria meningitidis
atgaaatggctcttcacccttttggcggtactcaatattgccgtattcggcggcacggtgggctataaattggccgttaaagcgacgggcggcgtgccggaaaaccgggccgtcgaaaacacgccccccgcaacgcccgccgccgacaatgcggcggcatccgtggaggatacggcggcactgctcaaaccgggcgacatcctgaccgaagagcaggccgagcagttgcgcttgaaaaaggaagcggaacagaaaaaactgagggagaaaaaacagcgtgaagaaaaagcccgccgcgaaaaactcgccgccgaaaaggcgcaggcggaacgcgaaaacggcgcggcggatgccttatgcgccgcgcaggcaagcctcacgatggacgaagatgactaccaccgcatcaaaggacttttgggcaaatggtcgcacgttgccagcaggagcgtcgaaaaacgcaccgccaaagccaaacctgccgacaaaacctaccgcgtcgtcctgcccgtttccgccgatgccgaaaatcaggcggcggagctgtctgccaaaggtttcaaccccataccgtttgacggcgcattgagtttgggtgtcggcaacagccgggaaaacgcccaagccctgcaaaaccggcttgccggcgccggattcggcggggcgcatattgtcgaacactttgccgaagccgacaggcaggacgattctttgagcgtgtcgcgtatgacggttttgtttaccggcgtgaatgccgccgatgcggacgaaattcgtaaaatcacgtccctatacggcaaactgaacctcaagtcttgcaaatag

SEQ ID NO: 71891 - DNA, 720 bp, Neisseria meningitidis
atggcgacactgtccaacaaaaccatcttagttaccggcgcatcgcaaggtctgggcgaacaggtcgccaaagcctatgcggcggcaggcgcaaccgtgattctggtggcacgccatcagaaaaaactggaaaaagtctatgacgcgattgtcgaagccggacaccccgaacccttcgccatccgtttcgacgtgatgagtgcggaagaaaaagaattcaatcagttcgccaccaccattgccgaagccacgcaaggcaaactggacggcatcgtccactgcgccggctatttttacgccctctcgccgctggatttccaaaccgtcgccgaatgggtcaaccaataccgcatcaacaccgtcgcacctatggggctgacccgcgccctgttcccgctgctgaagcagtcgcccgacgcgtccgtcatcttcgtcggcgaaccccacggcgaaacacccaaagcctactggggcggcttcggcgcgtccaaagccgcgttgaactacctgtgcaaagtcgccgccgacgaatgggaacgcttcggcaacctgcgcgccaacgtcctcgtccccggacccatcaattccccgcaacgcatcaaatcccatccgggcgaagccaaaagcgaacgcaaaagctacggggacgtgctgcccgcatttgtctggtgggcaagtgccgaaagcaaagggcggagtggcgaaatcgtttacctctaa

SEQ ID NO: 71892 - DNA, 273 bp, Neisseria meningitidis
  misc_feature 6, 7, 8, 9, 10: 'n' is a, c, g or t
gtgtgnnnnntcgccggcacagacggaactttacgcaaccgcttcaaacaaagcggcgggctgttgcgcttaaaaaccggcacgctcaacaatgtccgcgcccttgcaggttattggctgggcgacaaaccgatggcggtggtcgtcatcatcaacagcggccgcgccgtttccctgctgcccgacttggacaacttcgttgccaaaaacatcatctccggcggcgacggctggctggatgcgaaactgatgtgcaaagaacgccgagcctga

SEQ ID NO: 71893 - DNA, 1914 bp, Neisseria meningitidis; identical to SEQ ID NO: 54493

SEQ ID NO: 71894 - DNA, 546 bp, Neisseria meningitidis; identical to SEQ ID NO: 55728

SEQ ID NO: 71895 - DNA, 1008 bp, Neisseria meningitidis
atgagcaccttcttccggcaaaccgcacaagccatgattgccaaacacatcgaccgtttcccactattgaagttggagcaggtgattgattggcagccgatcgaacactacctgaaccgtcaaaaaacccgttaccttagagaccaccgcggccgtcctgcctatcccctgctgtccatgttcaaagccgtcctgctcggacaatggcacagcctctccgatcccgaactcgaacacagcctcattacccgcatcgacttcaacctgttttgccgtttcgacgaactgagcatccccgattacagcaccttatgccgctaccgcaactggctggcgcaagacgacaccctgtccgaattgctcaaactgattaaccgccaactgaccgaaaaaggtctaaaaatagagaaagcatccgccgccgtcattgacgccaccattattcagaccgccggcagcaaacagcgtcaggccatagaagtcgacgaggaaggacaagtcagcggccaaaccacaccgagtaaagataaagatgcccgttggacaaagaaaaacggtttatacagactcggttacaaacaacatacccgtaccgatgaggaaggctatatcaagaaactgcacatcaccccagccaatgcccatgagtgcaaacacctgtcgcctttgctggaaggactgcccaaaggtacgaccgtctatgccgacaaaggctacgacagtgcggaaaaccggcaacatctggaagaacatcagttgttagacggcattatgcgcaaagcctgccgcaaccggccgctgtcggaaacgcaaaccaaacgtaaccgatatttgtcgaagacccgttatgtggtcgaacaaagcttcggtacgctgcaccgtaaattccgctacgcccgggcagcctatttcggactgattaaagtgagtgcgcaaagccatctgaaggcgatgtgtttgaacctgttgaaagccgccaacaggctaagtgcgcccgctgccgcctaa

SEQ ID NO: 71896 - DNA, 1410 bp, Neisseria meningitidis
atggatacacaaatcaaaactgaagccggtcagcagaataaccggcgttatctgaccgtttggcggtggcatttttatgccggtctgctggttatgccttttcttaccctgcttgccgttacgggtttgggtatgctgctgtttgccaatattaccggtaaggagggcgagcggattcatgttgtgccgcaggcaacggtacaacctctgtctgttcaggcggaagcggcacgcagtgccgttaatccggaaacttcgtccgtcgttcagtatattgcgccgcgtgccgatgatatggttgccgtgttccgtgtcaacaatgagggcaaggcaacgatggtcgcggtcgatccttatacggcaaaagtggtcagtaccatgccgcgcaatcagggttggtattacgcgatggatgaaatccacagcgatatgatgctcggttcgacaggtgattatcttttggaaacggctgcatcgctgacgattatcatgataatcagcggtttgtacctttggtgggtgaaacggcgcggcatcaaggcgatgctgctgccgccaaaaggcaaggcgcgttcttggtggcggaatctgcacggcgcgtttggaacttgggtgtcgttgattttactgttgttctgcctgtcgggtattgcttgggcaggtatttggggcggcaagttcgtgcaggcttggagtcagttcccggcaggcaaatggggtgtcgaaccgaaccctgtttcagtcgtgccgacccatggcgaggtattgaacgacggcaaggttaaggaagtgccgtggattttggagcttacgcctatgcctgtttcagggacgactgtgggcaaagacggcattaaccccgacgagccgatgacattggaaaccgtcgaccgttttgcgcgggaaatcggtttcaaagggcgttatcagttgaatttgcccaaaggcgaggacggcgtatggactttgtcgcaagactctatgagttacgatatgattagtccgtttgccgaccgcacggtgcatatcgaccagtacagcggcaagattcttgccgacatccgttttgatgattacaacccgttcggcaaatttatggcggcgagcattgcgctgcatatggggactttgggctggtggagcgtgttggcgaacgtcgtgttctgccttgccgtcatttttatcggtatcagcggctgcgtgatgtggtggaaacgccgtccgaccggagcggtgggcatcgttccgccggcgcagaaagtcaagctgccggtttggtggatgatggcattgccgctattggcaatcgcactgctcttcccgaccgcactgcttgccattgccgtgatttggctgttggataccttgctgctgtcgcggattcctgttttgaggagatggtttaaatga

SEQ ID NO: 71897 - DNA, 573 bp, Neisseria meningitidis
atggacaatcccgctacggcaccctggcaggacggttggctgcaaagcgtgcgccacattccgtcgccgaatttcggcccgagggagtccaaagaagaggtttcccttgtcgtattgcacaatatctcgctgccgccgttcgaatatggtacggatgcggtggaaaagctgtttgccaaccggctcgaccccgacggacatccgttcttcagcctgatacacactttgcgcgtatccagccatttcttaatcaaacgcgacggcgaaacggtacagttcgtttcctgcgacaatatggcataccatgccggcgtatcctcgtttcgcggacgggaaaaatgcaacgcattttccatcggcatcgaattggaaggctgcgatttcgaaccctttaccgaagcgcaataccgttcgctcgaagccttgttggacgcaatctgccgccgctaccccatcacagcggtaacggggcaccaagacatcgcgcccggccgcaaaaccgaccccggccattttttcgactggcggcggatacgggggaaagggtttcccgtggacagaaatgccgtctga

SEQ ID NO: 71898 - DNA, 837 bp, Neisseria meningitidis; identical to SEQ ID NO: 55421

SEQ ID NO: 71899 - DNA, 633 bp, Neisseria meningitidis
atgaccctacgttacgaaatcctctccgttacccccttccgccaaaactgcaccctgatttgggacgacgaaagcggcgaagccgtcctgaccgatgtcggcggcgacgtgccgttcctgctgcaagcgttggcaaaccgcaagctcacgctcacggcaatctggctgacgcacggccatctcgatcacgcgggcggcgtggtcgaaatgttgaaaacgcgcaacgttcccgtcctcgggccgcatccggacgatgaattcctgctccaatcgctgccgcaaaccaccgcgcaatacggattccccgtctcgcccgcctttgcgccgaaccgttggctcgaagaaggcgaaacgctcacggtcggacgctatgcctttcaagtgctgcatattccgggccatacgccgggacatatcgtcttttattgtgccgaggcggaattgctgattgcgggcgacgtgttgttttacgaaaccataggcagaaccgattttccgcgcggcaaccacgccgacttaatcaataatatccgcaacaaattattcgccctccccgaaaccgtgcaagttgtcgccggacacgggcgtatgacttccatcggacacgaaaaacggcacaatccgtttttctaa

SEQ ID NO: 71900 - DNA, 648 bp, Neisseria meningitidis; identical to SEQ ID NO: 37687

SEQ ID NO: 71901 - DNA, 276 bp, Neisseria meningitidis
atgaacgcgtcaaactggagcgtttacctgatattgtgtgaaaacagcgcgttctattgcggcatcagcccgaatccgcaacagcggcttgccgcccacacaaccggtaaaggcgcgaaatatacccgcgtattcaaaccggtggcgatgcgtatcgttgcaggcgggatggataaaggcacggcactcaggcaggaaatcgccgtcaaaaaactgaccgccgcacaaaaacggcaattgtgggaacaggcggaaaaaatgccgtctgaaacctga

SEQ ID NO: 71902 - DNA, 594 bp, Neisseria meningitidis; identical to SEQ ID NO: 43228

SEQ ID NO: 71903 - DNA, 384 bp, Neisseria meningitidis; identical to SEQ ID NO: 38324

SEQ ID NO: 71904 - DNA, 129 bp, Neisseria meningitidis; identical to SEQ ID NO: 55260

SEQ ID NO: 71905 - DNA, 3879 bp, Neisseria meningitidis
atgacctaccccatccccaaaccccgtgaaaaatcccgttggcccaatctttcgcaaggctcgctgccgctggctttggcgcgttatctgccgcacaagcggctcaaagtcgtgctgacccaagatgcggaacaggcgttgcgccttcagacggcatggcggtttttccgtccgcacgatacggcggtgttcctgccggactgggaaacgctaccttacgagcgtttttctccgcatcaggatttggtgtcggagcggctgtcggcgttgtggcagattaagagcggcgcggcggacgtgttgtttgtgccggttgccacggcgatgcagaagcttccgcccgtgccgtttttggcggggcgcacgttttggctgaaaacaggacagactttggatataggccgtctgaaaaccgatttggtagatgcgggctacaaccatgtttcccatgttgttgcggcgggcgagtttgccgtgcgcggcggcattgtcgatttgttccccatgggcagcgaaatgccctatcgcatcgatttgtttgacgatgaaatcgacagcatcaaaacctttgacaccgagacgcagcgcaccatctcccccgtttccgaaatccgtctgctgccggcgcacgagttccccaccgacaacgaggcgcaaaaaatcttccgcagccgttttcgcgaggaagtcgatggcaatccgaacgatgccgctgtgtacaaagccgtcagcaacggtcatttcggcgcgggcgtggaatactacctgccgctgttttttgaaaacgagttggaaacgctgtttgactatatcggcgaagatgcgctgtttgtctctttaggcgatgttcatgccgaggcaaaccgtttttggagcgatgtcaaatcgcgttacgcgatggcgcagggcgacgaaacctatccgcctttgcttccacagtatttgtatctctctgccgatgtgttcgcaggccgtctgaaaaactacggacaggtgctgcccgatgtttccggcaaggaatacaccctgcccgaccttgccgtcaaccgccaagcagatgagccgttgcaggcattgaaggattttcagacggcgtttgacggacggattttgctgtgcgccgaaagtttgggacggcgcgaaactatgctcggtttcttgcagcaaaacggtttgaaagccaaacccgtgtccgactggcagggctttttatcggcacacgagccgctgatgattactgttgcgccgttggcatacgggttcaaactgggcgggctgcaatctccgagccaacagcaagctgctcccgcctccgaaggagaaggcgatgcgattaccgaccaaaccgaattttccgcatccgcaacaaaccctctccctagccctctcccgcaggagagggaacaaagtgccgccgccgtttcagacgacctgaaagccaaaagcagcctgcatctcgtcgcaagtaatctgcacgggcaaatccgacagcaacctactccctcccccgtgggggagggttggggagagggcaaagcggctgccgaccaaaccgaatttttcttagccgtaacaagtcctctcccgcaggagagggaacaaagtgccgccgccgtttcagacggcctgaaaaccgaaagcagcctgtattccatcgcaaataatctgcacggacaaatccgacagcaacctgccccctcccccgtgggggagggttggggagagggaaaagcagttgccgaccaaagtgccatcgccgtcattaccgaatccgacctctaccaatacgtcgcccgttcgcgcgtccacaaccgccgcaagaaacacgccgccgtttcagacggtctgttgcgcgaccttgccgaaatcaatatcggcgatcccgtcgtgcacgaagaacacggcatcgggcggtatatgggcttgatcacaatggatttgggcggcgaaaccaacgaaatgatgttgcttgaatatgcaggcgaagcgcagctttatgtgcctgtttcgcaactgcatttaatcagccgctactccggtcaggcgcatgaaaacgtcgccctgcacaagctcggcagcggcgcgtggaacaaagcgaaacgcaaagccgccgaaaaagcgcgcgataccgccgccgagttgcttaacctttacgcccgacgtgccgcccaatcgggacacaagtttgaaatcaacgagttggattatcaggcgtttgccgacggtttcggctacgaggaaaccgaagaccaggccgccgccatcgccgccgtgattaaagacctgacacaggcgaagccgatggaccgactcgtgtgcggcgatgtcggttttggcaaaaccgaagtcgccctgcgcgccgcgtttgtggcggtgatgggcggcaaacaggtcgccgtactcgccccaaccacgcttctagtcgagcagcacgcgcaaaactttgccgaccgtttcgccgatttccccgtgaaagtcgccagtctttcgcgtttcaataacagcaaagccaccaaagccgcactggaaggcttggcggacggcacggtcgatatcgttatcggcacgcacaaattggtgcaggacgacatcagattcaaaaacttaggtttagtcattatcgatgaagaacaccgcttcggcgtgcgccaaaaagagcagctcaaacgcctgcgcgccaatgtcgacatccttaccatgaccgccacgccgattccgcgcacgctcagcatggcgctcgaaggcctgcgcgacttttcgctgattaccaccgcgcccagccgccgccttgccgtcaaaacttttgtcaaaccgttcagcgaaggcagcgtgcgcgaagccgtgttgcgcgaactcaaacgcggcggacaagtgtttttcctgcacaatgaagtggatacgattgagaatatgcgcgagcggctgaaaaccctgctgcccgaagcccgcatcggcgtggcgcacggacaactgcgcgaacgcgagctggaacaagtgatgcgcgactttttgcagcaacgattcaacgtgttactctgttccaccatcatcgaaaccggcatcgacatccccaacgccaacaccatcatcatcaaccgcgccgacaaattcggactggcgcagctgcaccagcttcgcgggcgcgtcggccgcagccaccaccaagcctacgcctacctgctcacgcccgaatacatcaccaaagacgcagaaaaacgcctcaacgccatcgcagcggcagacgaactcggcgcaggtttcacccttgctatgcaggatttggaaatccgcggcgcaggcgaaatcctcggcgaagggcagtccggcgaaatgatacaggtcggcttcacgctctacaccgaaatgctcaaacaagccgttcgcgatctcaaaaaaggtcgccagcccgacctcgacgcaccgctgggcatcaccaccgaaatcaaactgcacagccccgccctgctgcccgaaagctactgccccgacatccacgagcgtctcgtcctctacaaacgcctcgccgtctgcgaaaccgtgcagcaaatcaacgccatacacgaagaactcgtcgaccgcttcggactgcccgaacaacccgtcaaaaccctcatcgaaagccaccacctgcggcttatggcaaaagaattgggtatcgatgccattgatgcggccggcgaagcggtaacggtaaccttcggtaaaaacaataatgtcgatccaaccgaaatcatcctgctgattcagaacgacaaaaaataccgccttgccggcgccgataagctgcggtttaccgcagagatggaaaatatcgaggtcagaatcaacaccgtaaaaaacgttttaaaaaccttgcaaaacagatgcctgcccaaataa

SEQ ID NO: 71906 - DNA, 405 bp, Neisseria meningitidis
atgaccgcccaaccctgccccatctgcacggcacaagatgaagatattttgctgcaaacccccaagctgcgcgtcatcgccgtccataaagacagcggttcgcctgcattctgccgcgtcatttggcgtaagcatattgccgaaatgaccgacctttcggcagcggaacgcggcgaattgatggaaatggtgtacaaagtcgaagccgctatgcgccaagtgtttcaacctgccaagattaacctcgccagcttgggcaatgtcgtgccgcacctgcattggcatattatcgcccgctttgaaaacgatgcgtccttccccgcgccgatttgggcaaaccccgtccggaaacacggtatgaccctgccgcaagattggacggaacagcttaaaaagctgctttaa

SEQ ID NO: 71907 - DNA, 777 bp, Neisseria meningitidis; identical to SEQ ID NO: 55779

SEQ ID NO: 71908 - DNA, 1098 bp, Neisseria meningitidis; identical to SEQ ID NO: 63278

SEQ ID NO: 71909 - DNA, 639 bp, Neisseria meningitidis; identical to SEQ ID NO: 39626

SEQ ID NO: 71910 - DNA, 405 bp, Neisseria meningitidis; identical to SEQ ID NO: 54850

SEQ ID NO: 71911 - DNA, 1257 bp, Neisseria meningitidis
gtggccaataaattaagaaactacaccatcaacttcggcccgcaacaccctgcggcgcacggcgtattgcgtatgatcttggagctggacggcgaaaccatcgtccgtgccgacccgcatatcggcctcctgcaccgaggcacagagaaactggcggaaaccaaaacctatctgcaagccttgccctatatggaccgcttggattacgtttccatgatggtcaacgagcaggcgtattgtttggcagtagaaaagctcgccggaattgacgtgcctatccgcgcccaatacatccgcgtgatgtttgccgaagtaacgcgcatcctcaatcacttgatgggcatcggttcgcatgccttcgacatcggcgcgatgaccgccatcctctacgccttccgcgaccgcgaagagctgatggacttgtacgaagccgtgtccggcgcgcgtatgcacgcagcctacttccgtcccggcggtgtttaccgcgacctgcccgacttcatgcccaaatacgagagcagcaaattccgcaatgccaaagtattgaagcagctcaacgaatcccgcgaaggcacgatgctcgactttatcgatgccttctgcgaacgtttcccgaaaaacatcgacacactcgaaaccctcctgaccgacaaccgtatttggaaacagcgtaccgtcggcatcggcgtcgtctcccccgaacgtgccatgcaaaaaggctttaccggcgtgatgttgcgcggttcgggcgtggaatgggacgtgcgtaagacacagccttacgaagtgtacgacaaaatggatttcgacatccctgtcggcgtgaacggcgactgctacgaccgctacctctgccgtatggaagaaatgcgtcaatccgtacgcatcatcaaacaatgttccgagtggttgcgtgtcaatccgggtccggtcattaccacaaaccacaaattcgctccgcccaaacgtaccgaaatgaaaacaggtatggaagacctgattcaccatttcaaactctttaccgagggtatgcacgttcccgagggcgagacctacactgctgtcgaacacccgaaaggcgagttcggcgtttacatcatttcagacggcgcaaacaaaccctaccgcctgaaaatccgcgcacccggcttcgcccacctgcaaggtatggacgaaatggcaaaaggccacatgctggctgatgtggtggcgattatcggcacgcaggatattgtgtttggcgaagtagacagataa

SEQ ID NO: 71912 - DNA, 1776 bp, Neisseria meningitidis; identical to SEQ ID NO: 54581

SEQ ID NO: 71913 - DNA, 273 bp, Neisseria meningitidis; identical to SEQ ID NO: 54352

SEQ ID NO: 71914 - DNA, 1464 bp, Neisseria meningitidis; identical to SEQ ID NO: 60977

SEQ ID NO: 71915 - DNA, 1146 bp, Neisseria meningitidis; identical to SEQ ID NO: 61275

SEQ ID NO: 71916 - DNA, 309 bp, Neisseria meningitidis; identical to SEQ ID NO: 54941

SEQ ID NO: 71917 - DNA, 1137 bp, Neisseria meningitidis; identical to SEQ ID NO: 60826

SEQ ID NO: 71918 - DNA, 792 bp, Neisseria meningitidis
atggcaagacatccctaccgccgcctgcgtcctgcaaaatccagctttcccgaagtcggcatttccgaagaaggcaatatccgttcgcttcacttgggcagcgacaccatccaaagctcaatgaacctcgaccacccgtccgagctggtactctcttacagccgtgccatgatgggctggctgctgtttaccgacgctcttccgcagcatatcacccaaatcggcttgggcggcggttcgtttgcacgctggatagacacctacctgcccgacacgcgccaaaccgccgtggacatcaacccgcaggtcatcgccattgcccgcagcctgttcgagttgcctttcgagggcgagaaatttgaaattatcgaagcagacggtgcagaatatatcaaagtcttccgccacaacaccgatgtgattttggtggacgggttcgacggcgaacaaatcatcgatgcgctggttgaagaaccgtttttccgagactgccgaaacgcactctcttcagacggcatattcgtaaccaactggtggagcggcgacaaacgctaccaacgcttcatcgaacggttgttgagcgtttttgaagggcgcgtcttggaacttcctgccgaaagccacggcaatgtcgcggtaatggccttccaaagcagccccaaagagcaaaacatagacaaactcaaaaaacgtgccgacaaactgagcaacgcatacggattggacttccaccgtatgcttgccggcctgaaagcgtccaaccccaacaacggcaagcatttccacctttaa

SEQ ID NO: 71919 - DNA, 660 bp, Neisseria meningitidis; identical to SEQ ID NO: 60400

SEQ ID NO: 71920 - DNA, 1296 bp, Neisseria meningitidis; identical to SEQ ID NO: 55228

SEQ ID NO: 71921 - DNA, 1104 bp, Neisseria meningitidis; identical to SEQ ID NO: 55122

SEQ ID NO: 71922 - DNA, 1176 bp, Neisseria meningitidis; identical to SEQ ID NO: 55293

SEQ ID NO: 71923 - DNA, 501 bp, Neisseria meningitidis
atgacccgtttgacccgcgcgtttgccgcggctctgatcggtttgtgctgcaccgcaggcgcgcacgccgacaccttccaaaaaatcggctttatcaacaccgagcgcatctacctcgaatccaagcaggcgcgcaagattcaaaaaacgctggacagcgaattttccgctcgtcaggacgaattgcaaaaactgcaacgcgaaggtctggatttggaaaggcagcttgccgaaggcaaactcagaaacgcaaaaaaggtgcaagccgaagaaaaatggcgcgggctggtcgcagcgttccgcaaaaaacaggcgcagtttgaagaagactacaacctccgccgcaacgaagagtttgcctccctccagcaaaacgccaaccgcgtcatcgtcaaaatcgccaaacaggaaggttacgatgtcattttgcagaacgtgatttacgtcaacacccaatacgacgttaccgacagcgtcattaaagaaatgaacgcccgctga

SEQ ID NO: 71924 - DNA, 2751 bp, Neisseria meningitidis
atgaccgacgcaaccatccgccacgaccacaaattcgccctcgaaaccctgccggtaagccttgaagacgaaatgcgcaaaagctatctcgactacgccatgagcgtcattgtcgggcgcgcgctgccggacgttcgcgacggtctcaagccggtacaccgccgcgtactgtacgcgatgcacgagctgaaaaacaactggaatgccgcctacaaaaaatcggcgcgcattgtcggcgacgtcatcggtaaataccacccccacggcgataccgccgtatacgacaccatcgtccgtatggcgcaaaatttcgctatgcgttatgtgctgatagacggacagggcaacttcggatcggtggacgggcttgccgccgcagccatgcgctacaccgaaatccgcatggcgaaaatttcccacgaaatgctggcagacattgaggaagaaaccgtcaatttcggcccgaactacgacggtagcgaacacgagccgcttgtactgccgacccgtttccccacactgctcgtcaacggctcgtccggcatcgccgtcggcatggcgaccaatatcccgccgcacaacctttctgataccgtcaatgcctgcctgcgcctgctcgatgcacccgacaccgaaatcgacgaactgatcgacattatccaagcccccgacttcccgaccggggcaaccatctacggcttgagcggcgtgcgcgaaggctataaaacaggccgcggccgcgtcgttatgcgcggtaagacccatatcgaacccataggcagaaacggcgaacgcgaagccatcgttatcgacgaaatcccctatcaggtcaacaaagccaagctggtcgagaaaatcggcgatttggttcgggaaaaaacactggaaggcatttccgagctccgcgacgaatccgacaaatccggtatgcgcgtcgttatcgagctgaaacgcaacgaaaatgccgaagtcgtcttaaaccaactctacaaactgactccgctgcaagacagtttcggcatcaatatggtggttttggtcgacggacaaccgcgcctgttgaacctgaaacagattctctccgaattcctgcgccaccgccgcgaagtcgttacccgacgtacgcttttccggctgaagaaggcacgccatgaagggcatatcgccgaaggcaaagcggtcgcactgtccaatatcgatgaaatcatcaagctcatcaaagaatcgcccaacgcagccgaggccaaagacaaactgcttgcgcgtccttggcgcagcagcctcgttgaagaaatgctgacgcgttccggtctggatttggaaatgatgcgtccggaaggattggctgcaaacatcggcttgaaagagcaaggttattacctgagcgagattcaggcagatgctattttacgcatgagcctgcgaaacctgaccggcctcgatcaagaagaaattgtcgaaagctacaaaaacctgatgggtaaaatcatcgactttgtggatatcctctccaaacccgaacgcattacccaaatcatccgcgacgaactggaagaaatcaaaaccaactatggcgacgaacgccgcagcgaaatcaacccgttcggcggcgacattgccgatgaagacctgattccgcaacgcgaaatggtcgttaccctgacacatggcggctatatcaaaacccagccgaccaccgactatcaggcgcagcgtcgcggcgggcgcggcaaacaggcggctgccaccaaagacgaagactttatcgaaaccctgtttgttgccaacacgcatgattatttgatgtgctttaccaatttgggcaagtgtcattggattaaggtttacaaactgcccgaaggcggacgcaacagccgcggccgtccgattaacaacgtcatccagttggaagaaggcgaaaaagtcagcgcgattctggcagtacgcgagttccccgaagaccaatacgtcttcttcgccaccgcgcagggaatggtgaaaaaagtccaactttccgcctttaaaaacgtccgcgcccaaggcattaaagccatcgcgctcaaagaaggcgactacctcgtcggcgctgcgcaaacaggcggtgcggacgacatcatgctgttctccaacttaggtaaagccatccgcttcaacgaatactgggaaaaatccggcaacgacgaagcggaagatgccgacatcgaaaccgaaatttcagacggcatcgaagatgaaaccgccgacagcgaaaacgcactgccgagcggcaaacacggtgttcgcccgtccggtcgcggcagcggcggtttgcgcggtatgcgcctgcctgccgacggcaaaatcgtcagcctgattaccttcgcccctgaaaccgaagaaagcggtttgcaagttttaaccgccaccgccaacggatacggaaaacgcaccccgattgccgattacagccgcaaaaacaaaggcgggcaaggcaatattgccattaacaccggcgagcgaaacggcgatttggtcgccgcaaccttggtcggcgaaaccgacgatttgatgctgattaccagcggcggcgtacttatccgcaccaaagtcgaacaaatccgcgaaaccggccgcgccgcagcaggcgtgaaactgattaacttggacgaaggcgaaaccttggtatcgctggaacgtgttgccgaagacgaatccgaactctccgacgcttctgtaatttccaatgtaaccgaaccggaagtcgagaactga

SEQ ID NO: 71925 - DNA, 429 bp, Neisseria meningitidis; identical to SEQ ID NO: 54930

SEQ ID NO: 71926 - DNA, 612 bp, Neisseria meningitidis
atgaagaataatgattgcttccgcctgaaaaacccccagtctggtatggcgctgatagaagtcttggtcgctatgctcgttctgaccatcggtattttggcactattgtctgttcagttgcggacagtcgcttccgtcagggaggcagagacgcaaaccatcgtcagtcaaatcacgcaaaacctgatggagggaatgttgatgaatccgaccattgattcggacagcaacaagaaaaactataatctttacatgggaaaccatcatacactatcagttgtggatggcgattttcaggttggtgtcataaaaactaagacgcagttggcagaggcacaattgaagagatttagttatgagctgaaaaatgccttgccggatgcggcagccatccattacgccgtctgcaaggattcgtcgggtaacgcgccgacattgtccggcaatgctttttcttcaaattgcgacaataaggcaaacggggatactttaattaaagtattgtgggtaaatgattcggcaggggattcggatatttcccgtacgaatcttgaggtgagcggcgacaatatcgtatatacttatcaggcaagggtcggaggtcgggaatga

SEQ ID NO: 71927 - DNA, 1008 bp, Neisseria meningitidis; identical to SEQ ID NO: 70739

SEQ ID NO: 71928 - DNA, 504 bp, Neisseria meningitidis
atgaacacccttcaaaaaggttttacccttatcgagctgatgattgtgattgccatcgtcggcattttggcggcagtcgcccttcctgcttatcaagactacacagcccgcgcacaagtttccgaagccatccttttggctgaaggtcaaaaatcagccgtcacagagtattacctgaatcacggcatatggcccggcaacaacagtgatgccggcgtggcatcttcttcaacaatcaaaggcaaatatgttaaggaagttacagtcgcaaacggcgtcattaccgccacaatgctttcaagcggcgtaaacaacgaaatcaaaggcaaaaaactctccctgtgggccaagcgtcaagacggttcggtaaaatggttctgcggacagccggttgagcgcaccgacaccgccaccaccaccgacgtcaccgccgccaccgacaacaacggaatcaacaccaagcacctgccgtcaacctgccgcgatgattcatctaccggttaa

SEQ ID NO: 71929 - DNA, 1188 bp, Neisseria meningitidis
atgaatgacttggcagctcagacaatacaagtagtaaataaatccgatgacttagtagcttcagcaatacagacagcaaataaatcaattgcagtatactgtcgttatattcgttccaatgatgttggtactactggtagtcaccaatcaggattttatattcaaaaacatttttcagacgacctctttgatgtagtttgccaaaagggaacaaataaaactatttcaatcaaaattaattggcaagatggaagcgtcactaatagcaattttaaatattacggccaaggcacgagaaatgaggcgagaattacgggttttggcaagaattttgaatttttaagtgataaatatagtggttccttattggtattgtgcagagcttgttataaagatttattattccatgcttttgttttatcttcagatgaagatattgaaatatttatcgcagaaactaacattttaccaggaagtttatatttacctaaaaaacaagaagtagaggataacctaacaaaattattttcactatttcctaacttccccaaaactgaagaaatggcagttttggcaagggaaaatattgcattaaataaaactaacgttagtaatgtgttaaaacaatgggtttcaaaggaatatgaattattttccatttttgaaaaacgtgaatttgaaattattaaatcaaaaattactgatttggatagcttcattaattttgcacattcttttacaaatcgcagaaaagcaagagcaggaaaatctttagagttacatttatcaagaatatttgacgaattttccttaaaatttgagacgcaagcgaagacagaagggaaaaagaaaccagattttttatttcctggaagtgaagagtaccatgcgatggatgaatcagggaatttcatatttcaaactgaaaagctgacaatgctaggttcaaagactacttgtaaggatcgctggcgccaagttttaaatgaagcagatcgaattcctcataagcatttatttactctacaagaaggtatatctgatactcaaattcaggaaatgagtgatgagaatttaaccttagttgtccctaaagaatccgtaaaaacatttggaacttttgggaaaacccatgttttaactttagaaaattttattaaatatataaagtctcagcaggttagttaa

SEQ ID NO: 71930 - DNA, 324 bp, Neisseria meningitidis; identical to SEQ ID NO: 37971

SEQ ID NO: 71931 - DNA, 351 bp, Neisseria meningitidis
  misc_feature 336, 337, 338, 339, 340: 'n' is a, c, g or t
atgaaacaaatgcttttagccgtcggcgtggtggcggtgttggcgggctgcggcaaggatgccggcggttacgagggttattggcgcgaaaaatcggacaaaaaagagggcgtgattgccgtcaaaaaagaaaaaggcaattacttccttaataaaatcaacgtatttacaggcaaggaggagtctttgcttttgtctgaaaaagacggcgcgctttcgataaacacggggataggggaaatcccgatcaaactttccgatgacgggaaagagctgtatgtcgaacgcaggcagtatgtcaaaaccgatgcggcgatgaaggacaaaatcatcgcnnnnncacacacttaa

SEQ ID NO: 71932 - DNA, 936 bp, Neisseria meningitidis
atgaacccgaaaaaactcgtcatcgccagccgcgaaagcctgcttgctatgtggcaggcaaagcatatccaaggccgtctgaaggctctgtatcccgattgcgaagtcgagattttgggcatgaccacgcgcggcgatcagattttggacaaaactttgtcaaaagtcggcggtaaaggcttgtttgtcaaagagttggaacaggctttatatgacgggcgcgccgatttggcggtgcattcgattaaagacgtgccgatggatttgcctgaaggtttcgcgcttgccgccatcggcgaacgcgccaatccgtttgacgcgtttgtgtccaaccaatacgcgcgtttggaagaaatgcccaaaggcgctgtcgtcggtacatccagcctgcgccgcgaagcccagttgcgtgcgcgctatccgcatttggttatcaaacctttgcgcggcaatgtgcaaacccgtttgtccaaactcgataacggcgaatacgacgcaattatcttggctgccgccggtttgcagcgtctggaattggacggacgcatccgcatgattttgtcggaatccgacagcctgcctgccgccggacaaggcgcattgggtatcgaaattgccgcgcaccgcgaagatttgtatgaggttttaaaaccgctaaaccacgataccacacacgcctgcgttacggccgaacgcgctttggcgcgcgctttgggcggaagctgccaagtgcctttggccgcatattgcacggaagaaaacggcttgctgaccttgcgcggactggtcggacaccccgacggttcggtcattttgcaggcggacgcgcaagcccctgccgaatatgccgacgcgctcggacgcgctgtcgctaagaaattggcggacgacggtgcgcgggaattgattggagcagtattgaatacggaaaattga

SEQ ID NO: 71933 - DNA, 657 bp, Neisseria meningitidis; identical to SEQ ID NO: 39727

SEQ ID NO: 71934 - DNA, 516 bp, Neisseria meningitidis
atgaaacgcaccaaaaaataccctttcttaacgttgcagcggcaacgtttccatttgaactttgaaaacgcctcttccgccgccggcatcccagccgaacgcgatttctaccgctgggcgtggtctgccttgaaaagcggataccgccgcgccgacatcagcctgattcttctggacgaagaagaagcccgagcctacaaccgcgactaccgcggcaaagattacgccaccaatgtcttgagtttcgcgctcaacgaaggcgaaatcctgccctgccaagtttcggaaaaactgtacggcgatttgattatctgcccgcaagtggttttgaaagaagccgccgaacaaggcaaaacacccgagcagcattttgcccacctgaccatacacggtactttacacctgatgggctacgaccacatcgaagacgacgaagccgaaataatggaagccgaagaaatccgcctgatgcgggcggcaggcttccccaacccctaccaagaggacggacattaa

SEQ ID NO: 71935 - DNA, 2427 bp, Neisseria meningitidis
atgtcggcacaaaccgatccgggctactttttcatgcccaaccacattattctgataggcgcgagcgaacgtccgtacagcctgggcgaacgcgtactcagcaacctgctgagtacgccctttcaaggaaaaatcacccccgtaaacccgcgccaccacaccatagccgggcttcccgcctacaccagcctcaacaaaatccccggcaatgcagacctgattattgccgttaccctacccgacagttacgacaccctcttcaaaacctgccgcaaaaagcagctccgacacatcatcctcatacaggactgggacagcctgtctgccgcagaactgcacaccgccgaaactgccatccgcaaacaccacggcaacggactcaacatcaccgcctgcaccaccgcaggcatccaactgccctcactcggacttaacatcagtacccaagacggatacgccgcaggccataccgccatactgaccggcaatgccgccgtcagccgccaaatcgacaacatcctgaacaaactccgtcaaggcacatcccgccacatcagcctgcatcccggcatcagccccatcacatccgccgattggctcaaccgcttcggacacagcctgcacaccaaaaccgccgtcctacaccacaaccctgaagaggatcagcgcaaactgttcagcgcaatccgccaatttacccgccatacgccgctgattctccacatcacctgccgcacgacagaaaccgaccgtgccgtactgcactgcctcgcccgacactgcaacttcctcatcagtttcaacgccgacgacctcgaagccgcactgcgcgcccaactgtccgacattccacccctgtcccgactcgacatcctgtccgacacgcctgccgaatggctgaacgcgcacgcgccaaaaaccctcgccctccactttcccaaccttccccaccacatccgcaacggacacctgaccggcacacccacaccctcaatctgccacgacatcgcctcacgtcagcttgcccgccccgacacccaagccgtcctgaccatcctcagcccctccggacacgaggattacaaaaaaacagcacgcgcccttatccgcctgtccgaacagaccgccaaacccctgctcgtcagcagccccttttcagacggcataacccatttcgacacccccactcaggcaatccgcaccctttcctaccgcaacaccgccgccgccctgaaacaggcacagctcgacattgcaccgccgcaaccgtgccgtctgaaaacaccgcaaccccaaaacatcaaaaaagccctcgaagccgccgaccccgccctaatcgccgaagccctgcacctccccccctaccggcacaccacccataacgccgtccaattccaattcggcagccactccctctatggcgacatcctgaccgcacgttgcaacggacaaaccactgccgtactcccgccgtttaccacgctcgacagccgccaccttgcccgctttgccgaactcgacggcacacaaaccctcgaccagttcctgcacacactgaccgtcattcccgaataccgccaacacattctcggcatcaccctcaacctaaacggcggacaatacagcagcgatttcatcttaaagacacccgaaacacacgacacgcccaaacgcaagaacacaggcaaagccgcccaaaccctcgaacatgccgccgcaaaaatgcagagtgccgccgcatacctgaaacacaaaaacccgacagccgccgaatttctccgccacacaagcgaagccgccgcagaactgctcggcagcaaaaccgaaaccggagcagccgtacccaacgtacttgccccctatcccgcagcacaccccaaaacactgtccctaaaaaacgacacgaccgttaccattacccccattttgcccgaagacgcagaagccaaacagcagttcgtccgcagcctcggtcccgaagcacggtacacacgcttcatgacccacaccaacgaactgcccgcagccacgttggcacgcctgtgcaaccccgattaccactgtgaagccgcatggacggcaaaggatgccgacagcaacatcgtcgccgtcgtccgccacagccgcctgaatcgcaacgaatgcgaattcggcatcacactggcggaacatatgcgcggcagcggactggcacagaaaatgatggaactcatcatccaaaccgccgcacagcaaggctaccggactatgagtgccgacattctcaaaaccaatacccccatgatcaaacttgctgaaaaatcaggatttaccctcaaggaatcggacaccgaaaaaaacctgtaccgcgcatatctgaaccttgcggcagacaaaacaacagaaaaaacaaataaaaacttgcacaccgaccacaaaataacctaa

SEQ ID NO: 71936 - DNA, 750 bp, Neisseria meningitidis; identical to SEQ ID NO: 55736

SEQ ID NO: 71937 - DNA, 123 bp, Neisseria meningitidis; identical to SEQ ID NO: 38799

SEQ ID NO: 71938 - DNA, 531 bp, Neisseria meningitidis; identical to SEQ ID NO: 54201

SEQ ID NO: 71939 - DNA, 768 bp, Neisseria meningitidis; identical to SEQ ID NO: 54533

SEQ ID NO: 71940 - DNA, 1482 bp, Neisseria meningitidis
ttggcaacagacattcccatccccgacctcaaacggctggcggggcatattgcggaacgcctggatgtattggcgcaatgcgaatcgccggtttatattgccgacattctcgaaagcgtgctgtccgttatcaaaaacgtcgataccggaggcaagcgcgcacgggaaaatttcaaacagattctgaaaaccgaattcatctacgccgccgctgcggtattgaaaaacaaaaccaaatgggaaatccccgaaaatacccgcaatctcgattcggacatcatctgtacctatatctgcgaagtgttcctaaaatcgcacctgctcggcaacagttttccgatgatgcgcccgcgcgaagtgaagcagatgcccgaaccggtgtttgacaaagtattgtttgccgaacagcgcgcccgccagttggaagttatccgaacgtcaaaatacatcttcgccatcgcgccttattacaccgacgatattccgttttccctgcgccgcttcctgtcggaagacaaactttataccagctacaaccgctattacaccgccatccatatccccgtccgcaacatcactcagaatgatgccctgcgttttgccaacggtttgaaacagattctctcgctgcaatccggcgtgagctgggaaatcatcgatatgatggacaggatagaggaaaactacgacaaaaaagccctgccgctgttgttttcgccattccccgcgcaagtcgaacgcacgcaggcgattgccgccagattggaccaattcgagcggctgttgggcgacaccgtcctcgatccgttctactattgcctgacgcgtatggcgaagggcgaggaagatttgaaatatatttatatcgccttccgccagtctttcggcggcatcttcaattcgtttgaaaacttccgcctgctgcccgcgctgtggatgagcagggatgcggaaaatatgtccgaccgcatgaacgcctatatttccgcaatggaagaccgccgccgcgagatattgtccatttggcagggaaagcctgaagaagaattttcccgcaagatggtcgtctgcctgatcgacttggaaaattgtttggaaaaacacctcgaacagttcaagccggtatcggaaagcatcgaagcctgtaccgccaaactgcaggagcaaccgtcgttcttcaacaggctgatgaaaaccaacgacaagctcaacaggcagattgacgtgttgcagaaacagtcggcagccatccacaacgaagcctatatcgaaatgaacacgctgctttaccgccaccgcgaagtggtttccgtccacaaccgcaaagcagattatgcggaaaagggcaaagagcagattgcgctgttcccgcgcggattgaacggcatcaccaagctgcccgccgccgtcctgttgcccgagcgtccctaccattttgatatgaaggaggttctgcatatattctcctggataccgaggtag

SEQ ID NO: 71941 - DNA, 324 bp, Neisseria meningitidis; identical to SEQ ID NO: 38414

SEQ ID NO: 71942 - DNA, 936 bp, Neisseria meningitidis
atggggcacaatatgatgaccacccaaaaatggtatgagcatattactaatgtaatcataggcaatactgctaatttcaatagcggttgccttgactctatagattatgtagatgaaagaaaaggcgttccgcttgcagctatgcaacatattttcatggacgttagagctgcagcttcccatgcctatctatttgaacatgatcttaagaaattcaagcaatatgcttatgttgcaggaaagctgggagttttgctgagtgtaaattctacagaccctgaacccttcttttttccctgtgacatgctcaacattcaaaatccgatgtttctgatgctgatgagcgacagcccacagctgcgtgagtttctggtgcgcaatatcgacaacatcgccaacgatacagaagccttcgtaaaccgctacgacctcaaccgtcatatgatttacaatactctgctgatggtggaaggtaagcagcttgatcggttgaaacaacgtagcgagaaagtcttggcgcatcccacccctagcaaatggctgcaaaagcggttgtacgattaccgcttcttcctcgctttcgccgaacaggatgccgaggcaatgaaagccgccttagagccgcttttcgataaaaaaaccgcgcgtatggctgccaaagaaacattgtcctatttcgatttctacctgcagccgcaaatcgttacctatgccaaaatcgcatccatgcacggtttcgatttgggcatagaccacgaaatcgcaccgagggatttgattgtttacgatccgctgccagcagacgaatatcaagacatcttcgattttatgaaacagtatgacttgtcttacccgtatgaatatctgcaggattggatagattactatacgttcaaaaccgataagctggtatttggtaacgcgaagcgagagtga

SEQ ID NO: 71943 - DNA, 600 bp, Neisseria meningitidis; identical to SEQ ID NO: 38180

SEQ ID NO: 71944 - DNA, 1719 bp, Neisseria meningitidis
atgaacctacatcaaaccgtcgaacgcgaagccgccgccgcctttgccgccgcaggcatcgccggcagccccgttgtcttgcagccgaccaaaaatgccgaacacggcgatttccaaatcaacggcgtgatgggtgcggcgaaaaaagccaaacaaaacccgcgcgaactggcgcaaaagatcgccgacgcattggcaggcaacgccgtcatcgaaagcgcggaagtcgccggtccgggctttatcaacctgcgcctgcgccccgaatttctcgcgcaaaacattcagacggccttgaacgacgcgcgtttcggcgtggcaaaaaccgacaaaccgcaaaccgtcgttatcgactattcctcgcccaatctggcaaaagaaatgcacgtcggccatctgcgttccagcatcatcggcgacagcatttcgcgcgtgtcagaatttatgggcaataccgttatccgtcaaaaccacgtcggcgactggggtacgcagtttggcatgttggtcgcttatttggtcgagcagcaaaaagacaatgccgcattcgagctggcggatttggagcagttttaccgcgccgccaaagtgcgctttgacgaagaccccgcctttgccgacaccgcgcgcgaatacgttgtgaagctgcaaggcggcgatgaaaccgttttggcattgtggaaacagtttgtcgatatttcgctctcgcacgcccaagccgtttacgacacgctgggcttgaagctgcgccccgaagacgtggcgggcgaatcgaaatacaacgacgatttgcagcccgtagtcgatgatttggttcaaaaaggtctggcagtcgaagacgacggcgcaaaagtcgtgttcttggacgagtttaaaaacaaagagggcgaacctgccgcatttatcgtgcaaaaacaaggcggcggcttcctttatgcttccaccgacttggcgtgtttacgctaccgtgtcggcacgcttcatgccgaccgcctgctgtacgtcgtcgaccaccgccaagccctgcacttcgaacaacttttcaccacttcacgcaaagccggctatctgccggaaaacgtcggcgcggcatttgtcggcttcggcacgatgatgggcaaagacggcaaaccgttcaaaacacgcagcggcgacaccgtgaaactggtcgatctgctgaccgaagccgtcgaacgcgccaccgctttggtgaaagaaaaaaatcccgaattgggtgcggacgaagccgctaaaatcggcaaaaccgtcggcatcggctcaatcaaatacgccgatttgagcaaaaaccgcaccagcgattatgtgttcgactgggacgccatgctctcgtttgaaggcaacaccgccccctatctgcaatacgcctacacccgcgtgcaaagcgtgttccgcaaagcaggcgaatgggatgcaaatgcgccaaccgttttgaccgaaccgctggaaaaacagcttgccgccgagctgctgaaatttgaagacgtactgcaaagcgtggcggacacggcgtatccgcactacctcgccgcctacctctatcaaattgcgaccctgttcagccgcttctacgaagcctgtccgatactcaaagccgaaggcgcaagccgcaacagccgcctgcaactggcaaaactcaccggcgacacgctgaaacaaggcttggatttgctgggcatcgatgtgttggacgtaatgtaa

SEQ ID NO: 71945 - DNA, 411 bp, Neisseria meningitidis
gtgaaactgctggcgaataactggcagccgattgccatcatcgcgcttgtcggcacgggtttggcggtgtcacaccatcaaggctacaagtcggcttttgcgaagcagcaggcggtcattgacaagatggaaaaagacaaagcgcaagccctgctgttgtcggctcaaaactacgcccgcgagctggaacaggcacgcgcggaagcgaaaaaatatgaagtcaaggcgcacgctgtcggcatggctttggcgaaaaaacaggcggaagtcagccgtctgaaaacggaaaataaaaaggaaatcgaaaatgtccttactcaagaccgtaaaaatgcaggcggcggttgtattgacggctttggccatcacggcttgcagctctacaagcgcgccctcggctacggaaattaa

SEQ ID NO: 71946 - DNA, 192 bp, Neisseria meningitidis; identical to SEQ ID NO: 43532

SEQ ID NO: 71947 - DNA, 1857 bp, Neisseria meningitidis
atgttgaacaaaatcttttcctggttcgaatcccgaatcgacccctatcccgaagccgccccgaaaacgcctgaaaaaggactgtggcggtttatctggagcaacatggctggggtgcggaaatggatagccgccctggctgcgctgaccgccggcatcggcattatggaagccctggtttttcaatttatgggcaaaatcgtggagtggctcggcaaatacgcgcccgccgaactgtttgccgaaaaaggttgggaactggcggcaatggcggcgatgatggtgttttcggtcgtgtgggcgtttgccgcgtccaacgtgcgcctgcaaacccttcagggcgtgttccccatgcgcctgcgctggaacttccaccgcctgatgctgaaccaaagcctcggtttttatcaggacgaatttgccggacgcgtgtccgccaaagtcatgcagaccgcgctggcgttgcgcgacgcggtgatgacggttgccgatatggtcgtttatgtgtcggtgtatttcattacctccggcgtgattctcgcctcgctcgactcatggctgctgctgccctttatcggctggattgtcggtttcgcttcggtgatgcgcctgctgattcccaaattggggcaaaccgccgcatggcaggcggatgcccgctcgctgatgaccggccgcattaccgatgcctattccaatatcgccaccgtcaaactcttctcccacggcgcgcgtgaagccgcctatgccaagcagtcgatggaagaatttatggttacggtgcgcgcccaaatgcggctggcgacgctgctgcattcgtgcagcttcatcgtcaacacctccctgaccctctccaccgccgcactgggcatctggctctggcacaacgggcaggtcggcgtgggcgcggttgctacagccaccgccatggcgttgcgcgtcaacggtttgtcgcaatacattatgtgggaatccgcgcggctgtttgaaaacatcggcaccgtcggcgacggcatggcaaccctgtccaaaccgcacaccatcctcgacaagccgaacgccctgccgctgaaagtgtcgcaaggcgaaatcaagttcgaacacgtcgatttctcctacgaagcgggcaaaccgctgctcaacggcttcaacctcaccatccgcccgggcgaaaaagtcggcttgatcggacgcagcggcgcgggcaaatccaccatcgtcaacctgcttttgcgcttctacgaaccgcaaagcggcacggtttcgatcgacgggcaggacataagcggcgttacccaagaatctttacgcgcccaaatcggtttggtcacgcaagatacctcgctgctgcaccgttccgtgcgcgacaacattatttacggccgccccgacgcgaccgatgccgaaatggtttccgccgccgaacgcgccgaagccgccggcttcatccccgaactttccgatgccaaagggcggcgcggctatgacgcgcacgtcggcgaacgcggcgtgaaactctccggcgggcaacgccagcgcatcgccattgcccgcgtgatgctcaaagacgcgcccatcctgctgctcgacgaagccaccagcgcgctcgattccgaagtcgaagccgccatccaggaaagcctcgacaaaatgatggacggcaaaaccgtcatcgccatcgcccaccgcctctccaccatcgccgcaatggacaggctcgtcgtcctcgacaaaggccgcatcatcgaagaaggcacacacgccgaactcctcgaaaaacgcgggctttacgccaaactctgggcgcaccagagcggcggcttcctcaacgaacacgtcgagtggcagcacgactga

SEQ ID NO: 71948 - DNA, 237 bp, Neisseria meningitidis
  misc_feature 4, 5, 6, 7, 8: 'n' is a, c, g or t
gtgnnnnntgcgacggcggcattttggttttgggtcaacggcatttcaggccgcctgaaagaggcggacaagcgtatcgacgaccttaaagaggagttgcacgcggtcaagctctcttatcacaccaaggcggacgccaaggcagacagcactaatattgcggcggccttggagcgaattgaaaacaagttagaaaaagtaaacgaaaaactggacaggaaagcagacaaatcatga

SEQ ID NO: 71949 - DNA, 324 bp, Neisseria meningitidis
atggatattgtgcaacttgggtcggcggaattgaaagcgtggatggacgaagggcggatgttttgtttgttggacgtgcgtacggatgaagaaacggcggtttgttcgctgccaaatgcgctgcatatcccgatgaatctgattccgctgcggcagaacgagctgccggatgatgtgccgcttgtggtgtattgccatcacggtatccgcagcctgcatacggcgatgtatttggcggacgcgggttttgaaaacctgtacaaccttcagggcggcatcgatgcatgggcggccgagattgacggcaacatgatgcgttattga

SEQ ID NO: 71950 - DNA, 891 bp, Neisseria meningitidis
atgaatcctaaatcccctttatttttacgactgtccgaccgtttggatgtgtacctgcgcctgatgcgggcggacaagcccattgggacgctgcttttgctgtggccgacctactgggcgttgtggctggcttcagacggtattcccgatttggcggtattggcggcgtttacaatcggcacgtttttaatgcgcagtgccggctgcgtcatcaacgattttgccgaccgcgattttgacggggctgtcgagcgcactaaaaaccgtccgttcgcacagggcagggtcaagaaaaaagaagcgctgctgctgacggcatttttgtgcctgcttgccgcattgtgcctgattccgctgaatcatctgacatggctgatgagtctgcccgcgctgtttcttgcgctgacttacccatttaccaaacgcttttttccgattccccaactctatctcgggcttgccttttccttcggtatcccgatggcgtttgccgccgttgccggaaacgtgccgcctcaagcgtggatactctttgccgccaatgtgttatggactctggcgtatgacacggtttatgcaatggcggacaaagaagacgatttgaaaatcggcatcaaaacctccgccgtcacgttcgggcgttacgacatcgccgctgttatgctgtgtcatggcggctttaccctgctgatggcagtattgggggcggttatcggtgcggcatgggcatattggacggcaatccccatcgtcctgctgctgcaataccgccaatatgccgccatcaaaagccgcgtccggcaaatctgttttgaaacgtttttggcaaacaacagaattggttgggtgtggtttaccgccatttttgcccatacgtttttcgcgaaataa

SEQ ID NO: 71951 - DNA, 1041 bp, Neisseria meningitidis; identical to SEQ ID NO: 54644

SEQ ID NO: 71952 - DNA, 2301 bp, Neisseria meningitidis
atgcaccgaccgaccgccaaacagattctgcacgaagtatttggttatcccgaatttcgcggcaggcaggaggctgtcatcaatactttggcaggcggcgggagtttgacggtgctgatgccgacgggcggcggcaagtctttgtgttaccagattcccgcgctgatgtgcgaaggcgtggcggttgtcgtatcgccgctgattgcgttgatgaacgaccaagtggcaaacctgcacgccgccggcatcgaagcggcggcagtcaacagcggcacatcggcagatggggcgcgcgagattgccgacaagcttgcccaaggccgtctgaaactgctttatgtcgcaccggaacgcctagttaccgaccgctttttgcgttttctcgaccaacaaaccgtcagcctgttcgccattgacgaagcgcactgcgtcagccagtggggacacgatttccgccccgaataccaacagctcggcatccttgccgaacgctatccgaacgtcccgcgcatcgccctgaccgctaccgccgatgccgccacgcgcgccgacatcaagcattatctgcacttggacaatgcgcccgaatttgtctccagcttcgaccgtccgaatatttattatcaggttatcgaaaaaaacaacggcaaaaaacaattgctggatttcatccgcaaagaaatgacggggcaaagcggcattgtgtattgcctaagccgcaaaaaggttgaagatgtggcgcagtttttgcgtgaaaacggattaaacgcgattccgtatcatgctggtttgagcatggacgtgcgcgaggaaaaccaacgccgctttacgcatgaagacaatattatcgtggtggcgaccgtggcgttcggcatgggcatagacaaacccgacgtgcgctttgtcgcccatctcgatatgccccagagtgtcgaacatttctatcaggaatcggggcgtgccggccgggacgggctgcctgccgcgagctggctgtgttacggtttgaacgattgggtgttgctgcgcgaacggattgccgaaggcaacagcgacgaggtgcaaaagcaaatcgaaatgcaaaaactcgatgccatgctttccgtctgcgaaaccgccgcctgccgccgcgtactgctgctcaaacatttcggcgaagaatccgaaccctgcggccattgcgacaactgcctgcatccgcccgtacggtttgacggcacggtgttggtgcaaaaattactcagctgcgtgtaccgcgccggacaacgttttgccgccggttacatcaccaaccttttgcgcggcaaaagcgacgattggatacgcggcaaccggcacgaacaactgtccaccttcggcatcggtacggagttgtccgacaaagaatggcgcagcgtcatccgccagtgtatcagcctcggctacctcaccgtcaacattacccgatatcaggcattgcaactgaccgaagccgccaaaaaagtcctcaaaggcgaaaccgaagtgatgctgcgtccgctcaagcgcgacaagcccgccgcccgcaccctcaaagacaactggctgcgtaccgaacgcgaagaacgcctgtggcaggcattgcgcgtttggcgtatgaaacaggcagaagccgaagtcatccccgcctatatgattttcggcgacaaaaccctgcgcgaccttgtcgaaaaaatgccgcaagacctcaacggactgcacgacatctacggtttgggcgaagccaaaatcgaccgtttcggacacggcatcctcgaagtctgccgcaacaccgccgactttagccacaatgccgtcatccgcccgcaaaccgaacgcgaacaacaactgcgtcaaaaactcgaagcctggcggtatgaacaggcaagggcggaaaactgcgccctgcatgccgtcctctccgacgaaagccttgccgatatgcttgccgatacgcccgaaaccgaaaccgacctcgaaggcgtacacggcttgggcagcgtacgcgccgccaaatacggacgggacatcctcgccgtctgccgtccgttttcagacggcatcgatgaagccgccaaacacaaacgccgcctgatgcgcgccctgattcaatggtgcaacgaaacggcaaaacacgaacagtccgaaccctaccgcattctcagcaaagccgccctgcgcgccattgccgccaaacagccggaaggtttggcggagcttgccgccgtatacggcgtaggcgaagaaaaagccgcacgttacggtgcggcggtgttggcggtattggaacgaaatgccgtctga

SEQ ID NO: 71953 - DNA, 537 bp, Neisseria meningitidis; identical to SEQ ID NO: 55520

SEQ ID NO: 71954 - DNA, 504 bp, Neisseria meningitidis
atggctttattgaatatcttgcaatatcccgacgagcgtctgcacacggtggcaaagcctgtcgaacaagtcgacgagcgcatccggaagctgattgccgatatgtttgaaacgatgtacgaatcgcgcggcatcgggctggcggcgacgcaggtcgatgtgcacgagcgcgtggtcgtgatggatttgaccgaagaccgcagcgaaccgcgcgtgttcatcaaccccgtcatcgttgaaaaagacggcgaaaccacttacgaagagggctgtctgtccgtgccgggcatttacgacaccgtaacccgcgccgaacgcgtcaaggtcgaggctttgaacgaaaaaggcgaaaagttcacgctggaggcggacggcttgctggcgatttgcgtgcagcacgagttggaccacctgatgggcatcgtgtttgtcgaacgcctgtcgcagctcaagcagggacgcatcaaaaccaagctgaaaaaacgtcagaaacatacgatttga

SEQ ID NO: 71955 - DNA, 165 bp, Neisseria meningitidis; identical to SEQ ID NO: 61827

SEQ ID NO: 71956 - DNA, 591 bp, Neisseria meningitidis; identical to SEQ ID NO: 36437

SEQ ID NO: 71957 - DNA, 2769 bp, Neisseria meningitidis
  misc_feature 6, 7, 8, 9, 10: 'n' is a, c, g or t
gtgtgnnnnngaggcttttttggaaaccccgatgcggttgatgaaaaatggaagcagtatttcaccgatttgagcaaacagccggggacggttgctgtcgatgtcgcacacacaccgattcgcgaatcatttgttactttggcgaaaaagaaaattgcatctgccgttgcgggcggtgcggatgaggcaatgctgaaaaagcaagtcagcgttttacggctgatttctgcctatcgtatccaaggcgtgggtgcagcccaacttgatccgctcaaacgtatccccccgcgcgatattgaagccctcgatccgaaattccacggtctgtcagatgccgatatgacgcttcaattcaatatgggcgagggcgattttgccaatcgcggcaaactgcctttgtcccaaatcatcagcaacctcaaacaaacctactgcggccacatcgcattggaatatatctatattcccaataccgaagagcgccgctgggtacgcaattattttgaaagcgtattgtccacaccgcattacaatgccgatcaaaaacgccgtatcttgaaagagatgactgctgccgaaactttggaacgttatctgcataccaaatatgtcggtcagaaacgtttcggtgtcgaaggcggcgaaagcgcgattgccggtttgaactacctgattcaaaacgccagtaaagacggcgtggaagaagtcatcatcggtatggcgcaccgtggccgtctgaatgttttggtgaacattttgggcaaaaaacccggcgatttgtttgccgaatttgaaggtcgtgccgaaatcaaactgcccagcggcgacgtgaaataccatatgggcttcagctccgatattgctaccccgcacggcccgatgcatgtttctttggcgttcaacccgtctcacttagaaatcgtcaacccggtggtggaaggttctgcgcgcgccaaacaaaaacgtttgggcgaaaacggccgcgacaaagtcttgccggtattgattcacggcgactccgcatttatcggtctgggagtcaaccaagcgacattcaacctgtctaaaacgcgcggttataccaccggcggtacggttcatatcgtcatcaacaaccaaatcggctttaccacttccgatatccgcgatacccgttcaaccgtacactgtaccgatatcgcaaaaatggtttccgctccggttatccatgtgaacggcgatgatcctgagcgtgtttgctttgccatccaagccgctttggattaccgcaaaaaattccataaagacatcgtgattgacgttgtctgctaccgtaaatggggtcacaacgagggcgatgatccgaccttgacccaaccgatgatgtacaaaaaagtatcgcaacaccccggtgcgcgtgctttgtacaccgagcaactgattgccgaaggcgtggtaacccaagccgaggcagacggttacatccaagcctaccgtgatgctttggacaaaggcgaacacgtcgagcaaacaacgttgagcaactttcaacgcacgcaaatcgactggagcaaataccaaggcaaagattggcgcgaacacatcgaaaccggtttgcctgccgcagatattgagcgtctcactgagaagtttaccgccgtaccggaaggctttgccctgcatccgactgcaaaacgtgtgattgaagcgcgtaaagccatggcatccggcaaacaagccatcgactggggtatggcggaaaccctcgcatacgccagcctcgtaaccaaaggccatggcgtgcgtatttccggcgaggactctgggcgcggtacattctcacaccgtcatgcggtattgcacgatcaaaaacgcgaaaaatgggacgacggtacttatgtccctctgcgccatatgggcgaaggtatgggcgagttcctggttatcgactccattttgaacgaagaagccgtgatggcgttcgagtacggctttgcctgctccgcgcctgacaagctgaccatttgggaggctcaattcggtgacttcgccaacggcgcgcaagtgactattgaccaattcctgtcttcaggcgaaaccaaatggggtcgtttgtgcggtctgaccaccatcctgccgcacggctacgacggtcaaggccccgagcactcctctgcacgcgtagaacgttggttgcaactgtgttccgagaacaatatgcaagtcatcatgccgtctgaagcgtcgcaaatgttccacctcttgcaacgccaagttttgggttcataccgcaaaccgctggtgattttcatgtccaaacgcctgttgcgcttcaaaggtgcaatgagcccgctggaaaacttcaccgaaggttcgactttccgtccggttatcggtgataccgccgaacgcgcaagcaacggcagcgtgaaacgtgtggtattgtgtgccggtcaggtttactatgacttggaagcaggccgtaccgagcgtaaactggaagatgatgttgcgattgtccgcgttgagcagctgtatccgttcccatacgaggaggttaaagccgaactggcgaaatatccgaacgcaaaatctgtggtttgggcacaagaagagccgaaaaaccaaggtgcgttctaccaaatccgccaccgcatcgaagacgttatcagcgaagagcaaaaactgtcttatgccggtcgtccaagcagcgcatcgcctgcagtgggctactcaagcaaacatattgcccaattgaaacaattggttgaagacgctttggcgttgtaa

SEQ ID NO: 71958 - DNA, 585 bp, Neisseria meningitidis; identical to SEQ ID NO: 38668

SEQ ID NO: 71959 - DNA, 1197 bp, Neisseria meningitidis; identical to SEQ ID NO: 69711

SEQ ID NO: 71960 - DNA, 528 bp, Neisseria meningitidis
ttggctgaaggtcaaaaatcagccgtcacagagtattacctgaatcacggcgaatggcccggcaacaacagtgatgccggcgtggcatcttcttcaacaatcaaaggcaaatatgttaaggaagttacagtcgcaaacggcgtcattaccgccacaatgctttcaagcggcgtaaacaacgaaatcaaaggcaaaaaactctccctgtgggccaagcgtcaagacggttcggtaaaatggttctgcggacagccggttgagcgcaccgacaccgccaccaccaccgacgtcaccgccgccaccggcaagaccaccgacaacatcaacaccaagcacctgccgtcaacctgccgcgatgattcatctaccggttgcatagaaacaccacgcgccgatttcaaatacttccaaaaaatcagccgttaccgagtattacctgaatcacggcatatggcccgccaacaacagttctgccgacgtggcatcctccccctccgacatcaaaggcaaatatgttcagaaagttga

SEQ ID NO: 71961 - DNA, 747 bp, Neisseria meningitidis; identical to SEQ ID NO: 54893

SEQ ID NO: 71962 - DNA, 699 bp, Neisseria meningitidis; identical to SEQ ID NO: 58898

SEQ ID NO: 71963 - DNA, 2259 bp, Neisseria meningitidis
atgtacacaagaattatggaaatcagcccttggacgctgcgttcggcaaagctggaaaaagaacacaaacggctgcaagagagcctgaccagtttgggcaacggctatatgggtatgcgcggcagctttgaggaaacctattccgccgacagccacttgggtacctacatcgccggtgtgtggtttcccgacaaaacccgcgtcggctggtggaaaaacggctaccccaaatatttcggtaaagccatcaacgcgctcaatttcagcaaagtcaaaatctttgtcgacggacaagaggtggacttggcgaaaaacgatgttgccggcttctccgtcgaactcgatatgcagcacggcgtgttgcgccgctcgttcaccgtattcggtgtgcgtttcaatgtgtgcaaattcctgtccgtcgcgcaaaaagagctggcggttatccgctgggaagccgtgtccgttgacggcaaaacccaccaaatccgcatcgattccatcatcgacgccgacgtgaaaaacgaagactccaactacgaagaaaaattctggcaggtattggacaaaggcgtttcagacggcctctcctacattgccgcccaaaccgttgccaatcctttcggcgtggaacaattcattgtcaatgccgagcaaacttttgccggcagctttaaagccctcggcggcagccaaaccgattggcaagtttccaattctttcgaggccgaagtcggcggcacgcccgaaacctttgaaaaacgggttattgttaccaccagccgcgattatcagggcttggaagccgtgaaagccgcaggccgcgccttgtcggaaaaaatcgcaggcgttgcgtttgaaaccttgctggacgcgcacaaagcgggctggttgcaccgttgggaaatcgccgacgtggtcatcgaaggcagcgacgaagcgcagcagggcatccgcttcaacctgttccaactgttctccacctactacggcgaagacgcgcgcctgaacatcggcccgaaaggctttaccggcgaaaaatacggcggcgcgacctattgggacaccgaagcctacgcagtgccgctctatctcgcactggccgaacccgaagttacccgcaacctgctgcaataccgccgcaaccaactgccgcaggcgcaacacaacgcgcgcgaacagggcttggcgggcgcactctatccgatggtaacgtttacgggcatcgagtgccacaacgaatgggaaatcaccttcgaggaaatccaccgcaacggcgcgattccttacgccatctacaactacaccaactacaccggcgacgaaagctatcttgccaaagaaggcttggaagtcttggtcgaagtgtcccgcttctgggcggaccgcgtccacttttccaaacgcaacggcaaatacatgattcacggcgtaaccggcccgaacgaatacgaaaacaacatcaacaacaactggtacaccaacaccctcgccgcatgggtattagactacacccgcgaagccctggcgaaatacccgcgtccggatttgaacgtgagcgccgccgagttggaaaaatgggcggacatcagcgcgaatatgtaccgtcctcatgacgaagaactcggcgtattcgtacaacacgacggattcctcgacaaagacatccgccccgtgtccgcgctttcgcccgacgatttgccgctcaaccagaaatggtcgtgggacaaaatcctgcgttcgcccttcatcaaacaggcggatgtcttgcaaggcatctatttcttcggcgaccgtttcaatatcgacgaaaaacgccgcaacttcgacttctacgaaccgattaccgtgcatgaaagctcgttgtcgccgtgtatccacgccatccttgccgctgaactgggcaaagaagaaaaagccgtggaaatgtaccagcgcaccgcccgcctggacttggacaactacaacaacgacaccgaagacggcctgcacatcacctccatgaccggctcgtggctcgccatcgtccaaggtttcgcccaaatgaaaacttggggcggtaaactcagcttcgcaccgttcctgccgagtgcgtggacaggctacgccttccacatcaactaccgcggccgtctgattaaagtcgccgtcggcaaagaaaacgtcgtcttcaccctgctcaaaggcgaaccgctcgatttgcaggtgtacggcaaagacatcacgctcaacggcagccacaccgccgcgttggaaaaataa

SEQ ID NO: 71964 - DNA, 750 bp, Neisseria meningitidis
atgaaagcactggtcgcagtaaagcgcgtagtggactacaacgtcaaagttcgtgtaaaagccgatggttcggatgtggatatcggcaatgtcaaaatgtcgatgaatccgtttgacgaaatcgctgtggaagaagccgtccgtttgaaagaagccggaaaagtaagcgagatcgtagcggtttctttgggcgaaaagaaatgcgaagaaacgttgcgtaccgctttggcgatgggtgccgaccgtgcaattcatgttgaaaccgatgcgaaattggagccgctggcagttgccaagttgctgaaagccgttgcggacaaagaaaatccgcagattttctttttgggcaaacaggcgattgattatgatgccaaccaagtggcgcaaatgctggctgctttgctgaatgcggcgcaaggtacgttcgcgtccaaagtacaaattgaaggcgacgaagtgcagattgtgcgggaaatcgatggcggcgaagaaaccatcgcattgaaactgcctgctgttatcagtgctgatttgcgtttgaacgagccgcgctttgtcaaactccccaatattatggcggcaaagaaaaaacctctggaaaaactggcgcctgccgatttggctaccgatattttacctcgtctgaaaacggtgaaatttgccgaacctaaggcgcgtcaggcaggcgtaaaagtagcaagcgttgccgaattggttgaaaaattgaaaaacgaagccaaagtgatttga

SEQ ID NO: 71965 - DNA, 351 bp, Neisseria meningitidis; identical to SEQ ID NO: 54522

SEQ ID NO: 71966 - DNA, 1011 bp, Neisseria meningitidis
atgaacgacaacacgcaaacccttcccccacgccgcctttccgttgcaccgatgctcgactggacggacaggcactaccgttatatggcgcgtcagattacccgaaatgcttggctttacagcgaaatggtcaatgccggcgcgattgtttacggcgataaagaccgctttttgatgttcaacgaaggcgagcagcccgtcgccctgcaactgggcggcagcgacccgtccgatttggcgaaagcagccaaagccgccgaagaatacggctacaacgaggtcaacctcaactgcggctgccccagtccgcgcgtgcagaaaggttcgttcggcgcgtgtctgatgaacgaagtcgggctggttgccgactgcctcaacgccatgcaggacgcggtcggcatccccgttaccgtcaaacaccgaatcggcgtggacaggcagaccgaataccaaaccgttgccgatttcgtcggcacgctgcgcgacaaaaccgcctgcaaaaccttcatcgtccacgcccgcaatgcatggctggacggactctcacccaaagaaaaccgcgatgttccgcccttgaaatacgattacgtttaccgtctcaagcaagagtttcccgatctggaaatcatcatcaacggcggcatcaccaccaacgaagcaatcgccggacacctgcaacacgttgacggcgtaatggtcggacgtgaggcatatcacaacccgatggtcatgcacgaatgggacaggctgttttacggcgatacccgcagcccgatcgaatactccgatttggtgcagcgtctctacacatacagccaagcccaaatccaagccggacgcggcacaatattgcgccacatcgtccgccacagcctcgggctgatgcacggtctgaaaaacgcccgcacttggcggcgtatgctttccgacgcaacgctcttgaaagacaacgacggcagcctgattctcgaagcgtggaaagaggtcgaacgggcaaatatgcgcgaatag

SEQ ID NO: 71967 - DNA, 921 bp, Neisseria meningitidis
atgaccaataaacccgccaaacgcccggtcaacggcgttcttctgctcgacaaacccgaaggcctttccagcaacaccgccctgcaaaaagcgcggcgtttgttccgtgccgaaaaagcagggcataccggcgtgctcgatcctttggcaaccggacttttgcccgtctgcttcggcgaagcggccaagttcgcccaatatctgattgatgccgacaaagcctacaccgccacgctgaaactcggcgaagccagcagcacgggcgatgccgaaggcgaaatcgttgccactgcccgcgccgatatttccttagccgaatttcagacgacctgccaagccctgacaggcaacatccgccaagtgccgccgatgttttccgccctcaagcacgaaggcaaaccgctgtacgaatacgcccgcaaaggcatcgtcatcgaacgcaagccgcgcgatattaccgtttacgccatcgatattgccgagtttgactcacccaaagccgtcatcgacgtgcgttgcagcaaaggcacctatatccgcaccctcagcgaagacatcgccaaacacatcggcacgttcgcccacctgaccgccctgcgccgcaccgaaaccgccggttttaccatcacccaaagccacacgctcgaagccttggcaaacttggacgaaaccagacgcgacagcctgctgctgccctgcgacgtattggtttcacacttcccccaaaccgttttaaacgattatgccgtccatatgctccgctgcgggcaacgaccgcgtttcgatgaagacctgccttccgatacgccggtacgcgtttacacggaaaacggccgctttgtcggcctggcggaatatcaaaaagaaatatgccgtctgaaagccttgcgcctgatgaatactgcggtatccgccgtctga

SEQ ID NO: 71968 - DNA, 990 bp, Neisseria meningitidis
atgaaacagcctgtttttgccgttacttccggcgagcctgccggcatcggccccgatatttgtttggacttggcgtttgcacgcctgccctgccgctgcgcggtattgggcgacaaacacctgttgcgcgcgcgcgccgaagccttgggcaaaagcgtcgtcttgcgcgacttcgatccggaatcaggcggcgcggcatacggcgagctggaagtgctgcacatccctgccgtcgaagcggttgaggcgggcaaactcaatcccgccaacgccgcctatgtgctgcaacttttggacaccgcgctcgcaggcatttcagacggcattttcgacggcatcgttaccgcgccgctgcacaaaggcatcatcaacgacgcgcgcgcaagcacaggttttttcagcggacacaccgaatatctggcggaaaaaagcggcacggggcaggtcgtgatgatgcttgccggcaaaggcctgcgcgtcgccctcgtaacgacccacctgccgctgaaagacgttgccgccgccatcacgcaaccgctgattgaaagcgtcgcacgcattttgcatcacgacttaaaacacaaattcggcatcaaaaatcccaaaatccttgtcgccggacttaatccccacgccggcgaaggcggacacctcggacacgaagaaaccgacaccattatccctgcattggaaaacctgcgccgcgaagggataaaccttgccggcccgtatccggcggacacattgttccagccgtttatgctcgaaggtgcggatgccgtattggcgatgtaccacgaccaagggctgcccgtgttgaaataccacagtttcgggcagggcgtgaacatcacgctgggtctgccctttatccgcacctctgtcgatcacggcaccgcgctcgatttggcggcaaccggcagggcggattccggcagcctgataactgccgtggagaccgccgtcgagatggcgcgcggcagcctttaa

SEQ ID NO: 71969 - DNA, 1494 bp, Neisseria meningitidis; identical to SEQ ID NO: 60605

SEQ ID NO: 71970 - DNA, 618 bp, Neisseria meningitidis
atgtttgcccttttggaagccttttttgtcgaatacggctatgcggccgtgtttttcgttttggtcatctgcggtttcggcgtgccgattcccgaggatttgaccttggtaacaggcggcgtgatttcgggtatgggttataccaatccgcatattatgtttgcagtcggtatgctcggcgtattggtcggggacggcatcatgttcgccgccggacgaatttgggggcagaaaatcctaaggttcaaaccgattgcgcgcatcatgacgccgaaacgttatgagcaggttcaggaaaaattcgacaaatacggtaactgggtcttatttgtcgcccgtttcctgcccggtttgagaacggccgtatttgttacagccggtatcagccgcaaggtttcatacttgcgttttatcattatggatggactggccgcactgatttccgtccctatttggatttatctgggcgaatacggtgcgcacaacatcgattggctgatggcgaaaatgcacagcctgcaatcgggtatttttgttatcttgggtataggtgcgaccgttgtcgcttggatttggtggaaaaaacgccaacgtatccagttttaccgcagcaaatga

SEQ ID NO: 71971 - DNA, 1011 bp, Neisseria meningitidis
atgagcaaaaaacgagttctgaccggcgtaaccaccaccggcatcccgcatctgggcaactacgtcggcgccatccgccccgccgtccgcgcggcgcaaaacctcgataccgaatccttcctcttcctcgccgattaccacggcatcatcaaatgccacgagccggagatgattcaccaatccacccaagccgttgccgccacttggcttgcctgcggactcgaccccgagcgcaccaccttctaccgccaaagcgacattcccgaagtgatggaattgaactggattctgacctgcatcaccgccaagggtttgatgaaccgcgcccacgcctacaaagccgccgtgcaggcaaatgcagaaaacaatcaggaagaccctgatttcggcgtggaaatgggtttgttcagttatcccatcctgatgactgccgatattctgatgttcaacgccaacgaagtccccgtcgggcgcgaccaaatccaacacgtcgaaatggcgcgcgacatcgccggccgcttcaatcaccgcttccgagaaatctttaccctgcccgaagtgaaaatcgacgaaaacgtcgaactcttggtcggtttggacggacgcaaaatgtccaaatcctacggcaacaccattccgctttgggaaaacgacaaaaaaacccaaaaatcggtcaacaaaatcatcaccaatatgaaagagccgggcgagccgaaacagcccgacgaaagcccattgtttgaaatctacaaagccttctccacgccgtctgaaaccgcagcgttcacgcaaatgcttgccgaaggcttggcttggggcgaggcaaaaaaacttttggcggcgaaaatcaacgccgaactcgccgaaccgcgcgaacgctacaacgagctgaccgccgacccttcgcaaatcgaagagattttacaggcaggcgcgcaaaaagcgcgtaaagaagcacgcgaattgttggacaaagtacgcgatgcggtcggcatccgcccgttgaaataa

SEQ ID NO: 71972 - DNA, 231 bp, Neisseria meningitidis; identical to SEQ ID NO: 70704

SEQ ID NO: 71973 - DNA, 1371 bp, Neisseria meningitidis; identical to SEQ ID NO: 54231

SEQ ID NO: 71974 - DNA, 1479 bp, Neisseria meningitidis
atgttcagcaagttaacccctttggctgaaaccggcatcccgaccctgtcgtgtgcaaacgcggcagggcgtttgttgcattcagacagccgccaaatcaaacaaggcgatattttcgttgcctgtccgggcgaatatgccgacggacgcagttatatccccgccgccgttgccaacggcgcggcttttgttttttgggacgacgatggcaaattcgcgtggaatcccgaatggaaagtccccaatcaaggcatcaaagatttgaaacaccgtgccggcatattggcggcgcaagtttacggcaacgtttcagacggtctcaaagtctggggcgtaaccggaaccaacggcaaaacctccatcacgcaatggctggcgcaagctgccgatttgttgggcgaaaaaaccgccattgtcggcacggtcggcaacggcttttggggtgcattggaagaaaccacgcataccacacccgcccccgtcgatgtccaaaccctgctctaccgtttccgtcaacaaggcgcaacagtcgccgcgatggaagtctccagccacgggcttgaccagtcgcgcgtcaacggcgtgtcattccgcagcgcaatctttaccaacctcacccgcgaccacctcgactaccacggcacgatggaagcctacggtgccatcaagtcgcgcctgttttactggcacggcttgaaacacgccgttatcaatgtagatgacgaatacggcgcggaactcgcaggtcgtctgaaaaaagattgtcccgatttggccgtttatagctacggcttcagcgaacacgccgacatccgcattaccgactttaccgcctcttcagacggcatagcagccgtattccaaaccctgtggggcgaagggaaatgccgcacgcgcctgctcggacggttcaacgcgcaaaacctcgccgcctgcatcgccttgctgtgcgccaacggctatccgcttgataatgtattggatgtgctggcaaaaatccgtcccgcttcagggcgcatggactgcatcatgaacagcggcaaacctttggtcgttgtcgattatgcccatacgcccgacgcattggaaaaagcactcgccaccttgcaggaaatcaaaccgcagggtgcggctttgtggtgcgtattcggttgcggcggcaaccgcgatcgcggcaaacgcccgctgatgggcgcggcagccgtacagggcgcggataaagtcgtcgtcaccagcgacaatccgcgtttggaaaatccgcacgacatcatcaacgacatcctgcctgccgttcccgcgcccgaatgcgtcgaagccgaccgtgccgccgccatccgttatgcggttgaacaagccgccgcaaacgacatcatcctgattgccggcaaagggcatgaaaactatcaggatgtacaaggcgtgaagcaccgtttttccgatcttgaaatcgtcggacaggctttgttaactcgtaaataa

SEQ ID NO: 71975 - DNA, 156 bp, Neisseria meningitidis; identical to SEQ ID NO: 39708

SEQ ID NO: 71976 - DNA, 876 bp, Neisseria meningitidis; identical to SEQ ID NO: 54975

SEQ ID NO: 71977 - DNA, 129 bp, Neisseria meningitidis; identical to SEQ ID NO: 43085

SEQ ID NO: 71978 - DNA, 246 bp, Neisseria meningitidis; identical to SEQ ID NO: 61264

SEQ ID NO: 71979 - DNA, 2088 bp, Neisseria meningitidis
atggattatttatcaagactgtcctttggatttaacaaaaagctacctgtcattctgcaaacagaagttgctgaatgtggtttagcatgcctgacatccatcttgtcctattatggctttcacactgatttaagaacgttacgccaaaaatacaccctgtcattaaagggcgcaaatcttgcagacatcatgagatttggcaatgaaatgaatttaacgccacgagctttgcgtttagagttagatgagctgtcaaatttacaactaccctgcattctccattggaacttaaaccattttgttgtactttgttccatttccaaagacagtatcgtcattatggaccctgctgtcggtatgcgaaaaatcaaaatggacgaagtttcacaaaaattcacagggattgccctagaattattccccaatacccattttgaagagaaaaaagaaacaaagaaaatcaaaatattatctctattaagggggatttcaggcttaaaacgctctttaattcaaatgcttatattagctatttctttggaagtctttgcattggttagtccattctttatgcaatgggtaatagaccatgtcattgtaactgctgataaaaatttattactgacccttactttgggatttggtttactggctatcctgcaacagttaattagcctgttacaagcatgggtaggtatgcacctatctacaactcttaatttacaatggaaagccaatatatttaaaaggttacttgacttacctaatgactatttcagtaaacgacatttaggagatgtgatttcaagatttggttcaatagatcatatccaagaaacactaacttctactttttttgttttagttttaaatagcttaatggctgtttttactttcgtgttaatgacaatttacagcactcaattatcgctgattgttcttttaacacttgttttgtacatactaattcgttggcttgcatattacccattaagaaatgcaacagaagaaaatattgttcatgaagccaaacaaaactcatatttcatggaaaccattcgtggtatccaatcagttaaattatttgataaacattatcaaagacatggcacttggatgagcctatttgtgagtacagtcaataccaagctgacaacagataaactctctgctttatttgaattttcaaataaactgttgtttagcatggaaaatattatcataatttatcttggtgcaagcgcaattttagatggttcatttacagtcggtgttctgatggcttttttggcttataaagggcaatttgaaagcagaacagcttctctcgttgaccaatacatccaaatcaaaatgttagggcttcatgctgaacgtttggctgacattactttaaatgaaacagaaactgaaattattaagtataatcatatacctaaattagataatgaacaactggttcttaaagttgaaaacgtctcattcagatatgctgataatgagccatatctttttgaaaacattaatttggaatttaaagataatgaagcagttgttttaacaggacaatctggtcgggggaagtccactttgttaaacattttaacaggtagcctaaaacctgaaactggtacagttagtattaatgggcatgatatatatcaagtttctccatcctttattaggggattgagcgggattgttcgccaagatgatgtcctttttgcaggttctattggggaaaatatttcattttttgatgaaagcccaaatatggagctcattgaacaatgtgcaaaaatggcacaaatacatgacgatatacttaaaatgccaatgggctatgagaccttgattggcgatatgggaaatatcttatcaggtggacaaaagcagagagttatcttggctcgtgcattgtataaacgacccaaaattctatttttagacgaagcaagtagccatttagatgtagaaaatgaacaaaaaattaaccataacctaaaaagtcttggtattatgaaaataatggttgcacaccgccaagaaacaattcaatcggcagataaaattctgaatttaggttga

SEQ ID NO: 71980 - DNA, 987 bp, Neisseria meningitidis
atgaaaaactttctttcccttttcgcctccatattgatgtctgccctgattgccgtgtggttcagccaaaacctcatcaacgcctactggcagcagacctaccaccgcaacagcccgctcgaaccgcttgccgcctacggatggtggcggagcggtgcggcattgcaagaaaacgcctacaccctttcagacggcatcaaagccttcctgtccggcgaaacgccgccgacggctcaagacggcggttcggcagatatgccgcctgaagccgccgcatccgaagccgtccctcaaaccggtgaaatccaagaatggaaacagaacaccgacaccgccgccgtccgtagcggcgacaaagtcttttttgccggcgactcgctgatgcagggcgttgcccccttcgtgcaaaaaagcctgaaacaacaatacggcatcgaatccgtcaacctcagcaaacaaagcacagggctgtcctacccctcattcttcgactggccgaaaacgattgaagaaaccctgcaaaaacatcccgaaatcagcgtgctcgccgtcttcctcggcccgaacgacccgtgggatttccccgtcggcaaacactatctcaaattcgctgccgacgaatgggcgcaagaatacctgaaacgcaccgaccgcatccttgaagccgcccgcgcgcaccacgtccaagtcgtctggctcggcatcccctacatgaaaaaagccaagctcgacgggcagatgcgctacctcgacaaactgctttcggaacacttggaaggcaaaatcatcctgattcccaccgcgcacaccctgagcggcggggaagaccgctacaccgattccgtcaacgtcaacggcaaacccgtccgctaccgcagcaaggacggcatacactttaccgccgaaggacaaaaactgctggcggcaaaaataatggaaaaaatcgtttttgaaccaagtacgcaaccatcaagtacacagccatga

SEQ ID NO: 71981 - DNA, 792 bp, Neisseria meningitidis; identical to SEQ ID NO: 61305

SEQ ID NO: 71982 - DNA, 465 bp, Neisseria meningitidis; identical to SEQ ID NO: 46412

SEQ ID NO: 71983 - DNA, 2214 bp, Neisseria meningitidis
atgaccgccatcagcccgattcaagacacgcaaagcgcgaccccgcaagaattgcgcgaatggttcgacagctactgcgccgcgctgccggacaacgataaaaacctcatcggtaccgcatggtcgctggcgcaggaaaactatcccgccgatgccgccacgccgtatggcgagccgttgtccgaccacttcctcggtgcggcgcaaatagtccatgaactcgacctgctgcccgatgccgtcgccgccaccctgcttgccgacatcggacgctacgtccccgactggaacctattggtttccgaacgctgcaacagtaccgtcgccgagctggtcaaaggtgtggacgaagtgcagaaactcacccacttcgcccgggtggacagcctcgccacgccagaagaacgcgcccagcaggcagaaactatgcggaaaatgctgctggcgatggttaccgacatccgcgtcgtgttaatcaaactggcgatgcgtacgcgcaccctgcaatttttaagcaacgcccccgacagccccgaaaaacgcgccgtcgccaaagaaaccctcgacatcttcgccccgctcgccaaccgtttgggcgtgtggcagctcaaatggcagctcgaagatttgggcttccgccatcaagagcccgaaaaataccgcgaaattgccctgcttttggacgaaaaacgtaccgaacgcctcgaatacatcgaaaacttccttaatatcctgcgtacggaactcaaaaaatacaatatccactttgaagtcgccggccgtccgaaacacatctactccatttacaaaaaaatggtgaagaaaaaactcagcttcgacgggttgttcgacatccgcgccgtgcggattctggttgataccgtccccgagtgttacaccacactgggcattgtccacagcctctggcagcccattcccggcgagttcgacgactacatcgccaacccgaaaggcaacggctataaaagtttgcacaccgtcatcgtcggcccggaagacaaaggcgtggaagtgcaaatccgcaccttcgatatgcaccaattcaacgaattcggtgtcgccgcgcactggcgttacaaagagggcggcaaaggcgattccgcctacgaacaaaaaatcgcctggttacgccaacttttggactggcgcgaaaacatggcggaaagcggcaaggaagacctcgccgccgccttcaaaaccgagcttttcaacgacacgatttatgttttgaccccgcacggcaaagtcctctccctgcccacaggcgcgacccccatcgacttcgcctacgccctgcacagcagcatcggcgaccgttgccgcggtgcgaaagtcgaagggcagattgtgccgctgtccaccccgctcgaaaacggacagcgtgtcgaaatcattaccgccaaagaagggcatccttccgtcaactggctttacgaaggctgggtcaaatccaacaaggcaatcggcaaaatccgcgcctacatccgccagcaaaacgccgacaccgtgcgcgaagaaggccgcgtccaactcgacaaacagcttgccaaactcacgcccaaacccaacctgcaagagcttgccgaaaatctcggctacaaaaagccagaagacctctacaccgccgtcggacaaggcgaaatttccaaccgcgccatccaaaaagcctgcggcacgctgaacgaaccgccgcccgtacccgtcagcgaaaccaccatcgtcaaacagtccaaaatcaaaaaaggcggcaaaaacggcgtgctcatcgacggcgaagacggtctgatgaccacgcttgccaaatgctgcaaacccgcgccgcccgacgacattgtcggcttcgttacccgcgatcgcggcatttcggtacaccgcaaaacctgcccctctttccgacacctcgccgaacacgcgcccgaaaaagtactggacgcaagttgggcggcgttgcaggaaggacaagtgtttgccgtcgatatcgaaatccgcgcccaagaccgctccgggcttttgcgcgacgtatccgacgcgctcgcccgccacaaactcaacgttaccgccgtgcaaacccagtcccgcgacttggaagccagtatgcggttcacgctcgaagtcaaacaggtcaacgacctcccgcgcgtcctcgccagcctcggcgacgtcaaaggcgtattgagcgttacccggctttaa

SEQ ID NO: 71984 - DNA, 501 bp, Neisseria meningitidis; identical to SEQ ID NO: 37418

SEQ ID NO: 71985 - DNA, 423 bp, Neisseria meningitidis; identical to SEQ ID NO: 37313

SEQ ID NO: 71986 - DNA, 393 bp, Neisseria meningitidis
  misc_feature 370, 371, 372, 373, 374: 'n' is a, c, g or t
gtggatgagaaacaaaaaattaagattcttgattttcaaatcgatttatcctcaatttttaactcttataaaaatcaaatgggtattaatattcaagataaaaacttaaaaaacaatttctgttcttttatggaagaactgttaaatgacggttcaatccgtttacatgattataccgacggtatcggaattcctctaactggaacttcaaaagaacaagtgcagaaattgaaagacatatggcctactttggaagatgcccaagcaatatggcctgaagacccttggtattacttagaatggctttggtgggatattgcgtgtccaatagatttggccgatttgccgaatattgatatttatgagcaannnnncacacacttaattaattaa

SEQ ID NO: 71987 - DNA, 600 bp, Neisseria meningitidis; identical to SEQ ID NO: 41967

SEQ ID NO: 71988 - DNA, 2526 bp, Neisseria meningitidis
atgaatccaaactcaaaacataacactaaccttaccaatcttcttaaaccgtctgatagtgatataaaacaatttgccgcacaacacatccgccacctcaccgacctgctcaaccgctacgcctacgaatactacaccctcgacgcgcccagcgtacccgatgccgaatacgacaaattattccgtgaactcgaagcgttggaacgaaaccatcccgagctcaaactgcccgacagcccgacccagcgcgtcggcggcgagcctttggcaggctttgccgaagtgcgccacgaagtgccgatgctgtcgctgaccaacgctttttccccgcaagatgaaaacggcgtgttcgaccatgccgaaatgtacgctttcgaccaacgcgtgcgcgacggtttggacggcggcaatcccgaatacgttatcgaacctaaattcgacggcctcgccatcagcctgctctatcgcgacggcgtattgattcaagcagcaacgcgcggcgacggcacgacgggcgaagacgttacccaaaacatcaaaaccgtatccaacatccccttgcggctgcacggcgaaaatacgcccgaactcatcgaagtacgcggcgaagtactgatgcaaaaagccgattttgccgccctcaataaaagacaagccgaaaacgggcaaaaaccctttgccaatccgcgcaacgccgccgccggcagcctacgccaactcgattcgcgcatcaccgcgcagcgcaaactgcactttttcccctactccgttgcccgccagcaaggcggtttcgtcgcggaagaacacatccaagaactcgcctatttccaagcactcggcttcagtctgcccaatggcaatttcggctgtttcaaaaatatcgacgaagtattggcgttttacggacacatgcagcaaaaacgccccgaactgccctacgaaatcgacggcatggtcgtcaaagtcaacagcttggcgcaacagcacgaactcggcttcatctcccgcgcgccgcgttgggcggttgcccacaaattccctgccgaagaagccctgaccattgtcgaagcgattgacgtgcaaatcggcaggacgggcgcggtaacgccggttgcccgattacaacccgtattcgtcggcggcgtaaccgttaccaacgccaccctgcacaatcaggacgaagtatcgcgtaaagacgtgcgcgtcggcgataccgtcgtcgtgcgccgcgctggagacgtgattcccgaagtcgtgcgtgtgatttttgaacgccgcccgatgcaggaaaccgccgttgctgtttcagacggcatcgggcatcggcaggacgatttgtttgccgaagcaccggctgcaaaccaaacccaatccgttccgctctacaagccctaccgcctgccgacccattgccccatctgccgcagcgaaatcgaacgcgaagaaggtgaagccgtcgcccgatgcagcggcggcatgctttgtcaggcacaacgcgcgcaaggcttaatccacttcgcctcgcgcaaagcgatggacatcgacggcttgggtgaaaaacaaatcgaacagcttgtcgcccaagacctcgtccgccacttcgccgacctctaccgcctcgatattccgaccctgcaaaaaatgaaggaaacggcggacaaaaccgttgccgaatcggatcaaatgccgtctgaaggcagttcggtcggcgcgtcgggcaaacataaaaaacaaccgaccaagtgggcggaaaacatcctcgcaggcatagaatccggcaaaacgcccgaactcgcgcgcttcctgttcgcgctcggcatccgccacgtcggcgaacgcaccgccaaaacgctggcgcaggcattcggcacattggaacgcgtccgccgcgcccccgaacccgtcctcgcctgcctgcccgacatcggtacggtagtggcgcattccattgcccacttcttcgcccaagccgaacagcaggcgatgatagacgaactgctcgccgcaggcgttgccccgcaaacccaagccgttaccatcccgcccgcccgccacgccgaaccgcaacgctggatcgcccgcctgcccgacttcaaaattagcgaaaacaaagcccaagccttatgggaactcgctggtaaaaacatagaaggtctacaaaacgacaaagccctccccgccgactggcaagcatggcgcagcgaaccacaaaacgccgccctactcgaaaacctgaaaaccttcttcgcgcaaatgccgtctgaagacgaggcggcgcaaggttcagacggcatcaataaagccgtagcaggcaaaacctttgtattaaccggcaccctgcccacgctcaaacgcgaccaagcccaatccctaatcgaagccgcaggcggcaaagtttccggcagcgtgtccaaaaaaaccgactacgtcgtcgccggagaagccgcgggcagcaagctggaaaaagccaatgccttgggcgtttccgtcctcagcgaagccgaactgcttaccctgctcggctga

SEQ ID NO: 71989 - DNA, 1977 bp, Neisseria meningitidis; identical to SEQ ID NO: 70059

SEQ ID NO: 71990 - DNA, 357 bp, Neisseria meningitidis
atgaatgaacacaacctgttaattttctgtttaaaagacaatgtttcaattagtgaatatactgaaatgattgattgggcttataaaaacattcaatctgaaacagttgtagaaattacggaaaatcaaattattgaatatcaaaatcgtggattatggagacttgtttctgaaattaccgataattggttatttggaccaagtgagggggattggctaatagataaggaaagtattttggctgtaaaagaaaaattacaaaattcagatttttctacagagtccttagtgaaaaatattattcatgcacttgaatatgctataaaaaatgaaaaaacagtaatttttcatttttga

SEQ ID NO: 71991 - DNA, 897 bp, Neisseria meningitidis; identical to SEQ ID NO: 55764

SEQ ID NO: 71992 - DNA, 723 bp, Neisseria meningitidis
atggacaaagatttgtatgccgtattgggcgtgtcgccgcaggcgggggtggacgaaatcaaacgcgcctaccgcaagctggcgatgaaataccatcccgaccgcaatccgggcaatccgcaggcggaagaaaagttcaaagaaatccaacgggcttacgatacgctttccgacctgtcgaaacggatgcaatacgacgcgtccttcagacggcatgaggaacgcgggcggcaggaagaggcattccgccgcgaacaggcgcgcagggagcagttttaccgcgaacagatgcgccgcgaacaggcgttcagacaggcgtttgaacggcaggcatcacgttcgtgccatacttacgaaccgtccggcggcggaagcgggcgcaactatgtcctcgccgcctacatcctgttcggtttgggtgcaatcatgctgttcatgcccatagtcggcgtgattttcgcctatatgcccatagtcggcgtgattctcgcctatatgaaacggaacagtttggacagcattgtctatgccgcacataccgaatacctgattaaaaccttttggcgcacattttggctttatattttgggtgcgctgactgcccttttgggtatcggcgtgctgattattattgcaacgaacgtctggtatttctaccgcatcatcgccggctttatccgcttcaacggcggcagggcggttgcacccgagaaatggatatag

SEQ ID NO: 71993 - DNA, 432 bp, Neisseria meningitidis; identical to SEQ ID NO: 55972

SEQ ID NO: 71994 - DNA, 771 bp, Neisseria meningitidis; identical to SEQ ID NO: 54335

SEQ ID NO: 71995 - DNA, 2454 bp, Neisseria meningitidis
ttggtcgaactgcttgcccaccgtgttccgcccggtgtggacgatgccgccaaagtcaaagcctcattcctggctgccgttgccgaaggcagcgcgtccagcccgctgatctcccccgaatatgcgaccgaactcttaggtacgatgctcggcggttacaatatccacgccttaatcgaactcttggacgacgacaaactcgcgcccattgccgccaaaggcttgaaacatacgcttctgatgttcgattccttccacgacgttcaggaaaaagccgaaaaaggcaacaaatacgcgcaagaagttttgcaatcttgggcagatgccgaatggttcgcctcacgcgccaaagttcccgaaaaaatcaccgttaccgttttcaaagttgacggcgaaaccaatacagacgacctctcccccgcgcccgacgcgtggagtcgtcccgatattccgctgcacgcgctggccatgctgaaaaacccgcgcgacggcatcacgcccgacaaaccgggcgaagtcggtccgattaaattgttggaagaactcaaagccaaaggccatccggttgcttacgtcggcgacgtggtcggtactggttcttcacgcaaatccgcgaccaactccgtcatttggcataccggcgaagacattccgttcgtgccgaacaaacgcttcggcggcgtatgtttgggcggcaaaatcgcgccgattttcttcaatacccaagaagattccggcgcgctgccgattgaagtcgatgtatctgctctaaaaatgggcgatgtcgtcgatatcctgccttatgaaggcaaaatcgtgaaaaacggcgagactgttgccgagtttgaattgaaatcacaagtattgctggacgaagtgcaagccggcggccgtatcaacctgattatcggtcgaggtctgaccgccaaagcgcgcgaagccctgaaactgcctgcctctactgcattccgcctgccgcaagcgcctgccgaaagcaaagccggtttcaccttggcgcaaaaaatggtcggccgcgcctgcggtctgcccgaaggacaaggcgtgcgcccgggtacttactgcgaaccgcgtatgacgacggtcggctcgcaagacacgaccggcccgatgacccgcgacgagttgaaagacttggcttgtttgggcttctccgccgatatggtgatgcagtctttctgccacaccgccgcctatccgaaacctgtcgatgtaaaaacccataaagaactgcccgcctttatttccacccgtggcggcgtgtcactgcgtccgggcgacggcgtcatccactcgtggctcaaccgcctgctgctgcccgataccgtcggcaccggcggcgacagccatacccgtttccccatcggtatttccttccccgccggctccggcttggttgcctttgccgccgcaacgggcgtaatgccgctcgatatgcccgagtctgtattggtacgcttcagcggcaagctgcaaccgggcgtaaccctgcgcgatttggtgaacgccatcccgctgtacgcaatcaaacaaggtttgctgaccgttgccaaagccggtaagaaaaacatcttctccggccgcatcctcgaaatcgaaggcctgcctgatttgaaagtggaacaagcctttgaattgaccgacgcatccgccgaacgctccgccgccggctgtaccgtgaagctcaacaaagagccgattatcgagtacatgaaatccaacgtcgtgttgatgaaaaacatgattgccaacggctatcaagacccgcgcactttggaacgccgcatcaaagctatggaaaaatggctggcaaatcccgagttgctcgaagcggataaagatgccgaatacgccgccgtgattgaaatcaacatggacgacatcaaagagccgattatcgcctgcccgaacgacccggacgacgtgtgcttcatgtccgaacgctccggcaccaaaatcgacgaagtattcatcggttcgtgtatgaccaacatcggccacttccgcgccgcctccaaacttttggaaggcaaggcagacacccccgtccgcctgtggattgcgccgccgaccaaaatggacgcgaaacaattgtccgacgaaggacactacggcgtactcggacgtgccggcgcgcgtatggaaatgccgggttgctccttatgtatgggtaatcaggcgcaagtacgcgaaggtgcgaccgttatgtccacctccacccgcaacttcccgaaccgtttgggtaaaaacacctttgtttacctcggttcggcggaattggcagcgatttgctccaaactgggtaaaatcccgaccgttgaagaatatcaagccaatatcggcatcatcaacgaacagggcgataaaatctaccgctatatgaacttcaacgaaatcgacagctacaacgaagtagccgagaccgtgaacgtttaa

SEQ ID NO: 71996 - DNA, 513 bp, Neisseria meningitidis
atgaaaaactttaacggcaaactcatcctcatcggactgatgggcgcgggcaaaaccacgctgggccggcaaatggcgcagcggctggattaccgtttttacgacagcgatcacgaaatcgccgtagccgccggcgttcccatccccaccatatttgaaatggaaggcgaacagggattccgttcgcgcgaaaccgccatactcaaaaagctggttatcctgccccatatcgtcctgtccaccggcggcggcgcggtgttaaaagaagaaaaccgcgcccttatccgcaaaagcggcacggtcgtctatctgcacgccccgcccgaaaccctgctcgaacgcacgcgctgcgacaacagccgtcctttgctgcaagttgccgatcctttggcgaaattacgtgaactctacgccgcacgcgaccccgtttaccgccaaaccgccgactttaccgtagaatcggcaaactgccgggaaaccgtgcaaaccctgctcaaacgcttatcccgataa

SEQ ID NO: 71997 - DNA, 1311 bp, Neisseria meningitidis; identical to SEQ ID NO: 54472

SEQ ID NO: 71998 - DNA, 1311 bp, Neisseria meningitidis; identical to SEQ ID NO: 54894

SEQ ID NO: 71999 - DNA, 321 bp, Neisseria meningitidis; identical to SEQ ID NO: 45714

SEQ ID NO: 72000 - DNA, 330 bp, Neisseria meningitidis
atggatgtgcaaaaacaatattcctttgaaaccgtcgccgtatgcgtgctgccgaaccatattcacgccatttggacgctgccgcccgacgatgcggattattccctactccggcggctgattaaaaccaaattctccgcatattccccttatactaaaaacttatccgccggcaaacagcggcagcacgaacgcggtatttggcaacggcgtttttacggacacaccgtgcgcgacgaaacggatttgcagcgttgcgcggactacatccattccaatcctatcaaacaaaaaatgtcgcgtgctaaaacagaatcctgcaaaaaataa

SEQ ID NO: 72001 - DNA, 1371 bp, Neisseria meningitidis
atgttagacaatttaaccagccgcttcagcaatgtcctcaaaaacatccgcgggcaagccaaactgaccgaagacaacattaaagaagccttgcgcgaagtccgactcgccctgcttgaggcggatgtcgccctgcctgtcgtcaaagagttcgtcaacaacgtcaaagaaaaggccctcggtcaggaagtggcgggcagcctgacgccggatcaggcatttatcggcgtggtcaaccaagccttagtcgaactgatgggcaaggaaaacaaaacgctggatttatcggttgcgccgcccgccgtcgttttgatggccggtttgcagggcgcaggtaagacgacgactgtcggcaaactcgcccgcctgctgaaaaacgatcagaagaaaaaagttttggtggtatccgccgacgtttaccgccctgccgcgattgaacagctgcgtctgttggccgaacaggtcggcgtggactttttcccatccgataccaaccaaaaaccggttgaaattgcaactgccgccgtcgattacgccaaaaaacatttttacgatgtattgatggtcgataccgccggccgtttggcaatcgatgaggagatgatgaacgaaatcaaagcccttcatgcggcggttaacccggtggaaactttgttcgtcatcgatgcgatgctgggtcaggatgcggtgaacactgctcaggcatttaatgaagccctgccgctgaccggtgtcgtattgaccaagatggacggcgattcgcgcggcggcgcagctttgtccgtgcgccacgtaaccggcaagccgattaaatttatcggtgtcggcgaaaaaatcaacggcctcgaacctttccaccccgaccgtcttgccagccgtatcctcggcatgggcgacgtattgaccctgattgaagacgtccaaaaaggtattgatgaagaagccgccgccaaaatggcgaaaaagctacacaaaggcaaaggcttcgacctcaacgactttaaagaacaaatccagcaaatgcgcaatatgggcggtttggaaaacctgatgtcgaaaatgccgggcgaactgggtcaaatctcgaaacaaatccccgaaggcacggctgaaaaagcgatgggcaaagtggaagccatcatcaactcgatgactccaaaagaacgcgccaaccctgccctgctcaaagccagccgcaaacgccgtattgcaatgggtgcgggcacaaccgtgcaggaagtgaacaaattgctcaaacagtttgaacaaatgcaacagatgatgaagatgttcagcggcaacggcttgggcaaactgatgcgtatggcgaaaggaatgagggggataaaagggatgttcccgggtttgtaa

SEQ ID NO: 72002 - DNA, 279 bp, Neisseria meningitidis; identical to SEQ ID NO: 62041

SEQ ID NO: 72003 - DNA, 936 bp, Neisseria meningitidis; identical to SEQ ID NO: 54416

SEQ ID NO: 72004 - DNA, 915 bp, Neisseria meningitidis
atgcagaattttggcaaagtggccgtattgatgggcggtttttccagcgaacgagaaatctcgctggacagcggcaccgccattttgaatgctttaaaaagcaaaggcatagacgcatacgccttcgatcctaaagaaaccccattgtctgaattgaaggcacaaggttttcagacggcattcaacatccttcacggtacttacggcgaagacggggcggttcagggtgcattggaactgttgggcattccctataccggcagcggtgtcgccgcatccgccatcggcatggacaaataccgctgcaaactgatttggcaggcattgggattgcccgttcccgagttcgccgtcctgcacgacgacactgatttcgatgccgtcgaagaaaaattgggcctgccgatgtttgtgaaaccggcggccgaaggcagcagcgtcggtgtggtaaaagtcaaagaaaaaggccgtctgaaaagcgtttacgaagaattgaaacaccttcagggcgaaatcattgccgaacgttttatcggcggcggcgaatattcctgccccgtcctgaacggcaaagggctgcccggcatacacatcattcccgcaaccgagttttacgactacgaagccaagtacaaccgcgacgacaccatttatcaatgtccttcggaagatttgaccgaagccgaagaaagcctgatgcgcgaactggcggttcgcggcgcgcaggcaatcggtgcggaaggctgcgtgcgcgtcgatttcctcaaagataccgacggcaaactctatctgttggaaatcaacaccctgcccggtatgacgagccatagtttagtaccgaaatccgctgccgttacgggcgtgggttttgccgatttatgtattgaaattttgaagaccgcacatgtgggataa

SEQ ID NO: 72005 - DNA, 645 bp, Neisseria meningitidis; identical to SEQ ID NO: 54864

SEQ ID NO: 72006 - DNA, 2007 bp, Neisseria meningitidis
atggctgatatgaagaaaattacccctcaaaacctgcgccccctgctttcggaaagcttgggacataccgattttgtcaacgtcctcaacgcactgattaaatttttgcgccgtggcggcaaaaaatgtgcgggggaacgtttcgacctgattatcgacacattcaaacaagacagggaattactgtcccgcttcagccggtgtttttacatctggctcgcgcaaatacacatttatccggcactcatcaaactcggcatcttctcgcgccacagctttgcccgggaaatgggcatacgcatctacgaacgcttcagcccgtcatataaagattttgccaacttgggcgaagtcttcctttatcttttccattccgaaaacgacgacaaatggctgcaaacgctcaatatccgccaatggctggttttatacgaactcatccggagccacgccgagccgtccaaattgcagacggcgggcatccgccttgccgatgcgcgtttgcgcgccatcgaaatgctgtctgtctggacggcatccgaagccatcgaacccgacctcatccgcatcgccccgcgcctgctggaggccgattcttccttcgtcgccctccaacgcgaaaccgccaaactggtcgaacactaccgcaacggcaccgcgccttacgacaccgcccacctcgaagtgatgttcgaccaatgtttcagccagattgactatttgcgccgcaaagggacgggcgcaggctccggttcgtcggtcaaagtcgcccacctgctcgaacggctccggcaaaccgtaggccgtctgaagctgcttaccgacatccaaaccggtgttggcaacagcaaccgcctgaccatcgcgctgatgaactccctcatctacgcggcagtcgaacaatacagcacccgccacctgcgccgcagcagcatccatatgctcgcccgcagcattaccgaaaacaaaagccaccacggcgaacactacatcacccgcaaccgcaaagaatatttcaaaatgttctactcggcggcaggcggcggcatcatcatcgccctgatggcgctgctcaaaatccgcatcggctcactcggcctcagccccttcctcacttccttgtcggctgggttcaactacggcatcggctttatgatcatccatatgctgcactgcaccgtcgccaccaagcagcccgcgatgactgccgccagctttgccgaacaggtcgatctcaacgaaggcggcaaagcggtggacaacaaactcgccaagctcctcatcgacgtatgccgctcccaaagtgtcgccgtcttcggcaacgtttccatcgccatccttttggcgtgcgccatatcgttcggctatgcccatctgtaccggctgcccatactcgatgcccacaccgccgcctaccagttcaaatccatagacatcatcgcttacccgacgctgtggtatgccgccattgcaggtctgtggctgttctgctccggcatcatcgcaggttttttcgacaaccgcgccgactacctcaacctgcgccaacgcctgcccttcaaccccttgctgcgtaaaatcatgcgccccgggccccgccgcgtcctcgccgcctacatccacaaacactacggctcgttggtaggcaacttcatcttcgggatgctcttgggtatgaccggctatttcggacacctcctcgggctgccgctggacatccgccacgtcgccttttcctccgccaacctcggctatgccgccgtcagcggcaacgtcggtttgggcacgttcgtactcggcattttcagcgtcctcaccatcggcctggtcaacctctgcgtcagtttcagcctcgccctcttcgtcgccctgcgctcgcgcggcacgaaaatcggcagcatccgcaatctgattaagagtttttggaatcagattaaaagcaatccctgcatacttttcctcccgcccgccaaagaacagggacatcctccttcggacaagccttga

SEQ ID NO: 72007 - DNA, 1389 bp, Neisseria meningitidis; identical to SEQ ID NO: 42559

SEQ ID NO: 72008 - DNA, 1032 bp, Neisseria meningitidis; identical to SEQ ID NO: 67525

SEQ ID NO: 72009 - DNA, 1245 bp, Neisseria meningitidis
atgtccaacgaaaaccgtacctgttccttttgcggaaaatccaaatcacacgtcaaacatttaattgagggcgaaaacgcctttatctgtgacgaatgcgtctcaaactgtattgaaatattgcatgaagacggaaatgacggcacgtcttcggaaagtgtcggacagacatcggaagagcccggcaagctgcccacgcccgccgaaatcgtcgccaacctcaacgaccacgttatcggtcaggaacaagccaagaaagccttggcggtgtcggtgtacaaccattacaaacgcctgcgccacccgaaagccggagctaatgtcgaattgtcgaaatccaacatcctgcttatcggcccgaccggatcgggtaaaaccctgctggcgcaatctttggcgcgcaaactggatgtgccgttcgtgatggcagatgcaaccacgctgaccgaagcaggttatgtcggcgaagatgttgaacagattattaccaagcttttgggcaaatgcgatttcgatgtcgaaaaagcccaacgcggcattgtctatatcgacgaaatcgataaaatttcacgcaaaagcgacaatccgtccatcacgcgtgacgtgtccggcgaaggcgtgcaacaagccttgctgaaactgattgaaggtacggtggccagcgttccgccccaaggcggccgcaagcatccgaatcaggaatttatcaacgtcgataccaccaacatcctgtttatctgcggcggcgcgtttgcaggcttggaaaaagtcatccgccagcgtactgaaaaaggcggtatcggtttcggtgcgtctgttcacagcaaggacgaaaatgccgacattaccaagctgttcggcatcgtcgaaccggaagacttgattaaattcggtctgattccggaattaatcggacgtttgcccgtgattgcaacactagaagaactggatgaggacgcgctgattaatattttgaccgagccgaaaaatgctttggtcaagcagtatcaagccttgttcggtatggaaaatgtcgagttggaatttgaagaaggcgcattgcgttccatcgcgcgtcaggcaatggagcgcaaaaccggcgcgcgcggcctgaggtccatcgtcgaacgctgcctgctcgatacgatgtaccgcctgcctgatttgcaaggcttgaaaaaagtggtggtcggtaaggcagtcatcgaagagggcagggaaccggaattggtgttcgagtcctga

SEQ ID NO: 72010 - DNA, 786 bp, Neisseria meningitidis
atgaaacaaactctgaaaaactggtttgctgccttattgctggcagtgcctatgagtgcagccgtcgccagcggcggcggacactacgaaaaagtcgatatcgacctgcgtgaccaagtcagcctgcagcacggtgcgcaaatctttacaaactactgtttgtcttgccactctgcaagcggtatgcgcttcaaccgtctgaaagacatcggtttgactgacgaagaaatcaagaaaaacctgatgtttaccaccgataatgtcggcgatgtcatgcattcggcgatgaacccgaaagatgcggcaaaatggtttggtgctgctccgcccgatttgacgttgattgcgcgttccaaaggtgcagactacctttacgcctatatgcgcggcttctataaagatccgacccgtccgagcggctggaacaatactgtattcgataaagtcggtatgccccacccgttgtgggagcaacaaggtgttcaagccgttgagttggatgccaaaggtcagccggttatggtaaaagacgaacacggcgagatgaagcctaagctgtattgggaatctaccggtttgcacagccgccgcctgcctaacggcaaagtgatccaaaaagagtacgacgcatatgtacgcgatttggtcaattaccttgtgtacatgggcgaacctgcacaactgcaacgcaaacgtataggctatgtcgtgatgattttcctatttgcggttatgctgcctttggcttacttcctaaataaagaattttctaaagatattcattaa

SEQ ID NO: 72011 - DNA, 792 bp, Neisseria meningitidis; identical to SEQ ID NO: 54677

SEQ ID NO: 72012 - DNA, 1392 bp, Neisseria meningitidis
atgagcggtcagttgggcaaaggtgcggatgcgcctgatttggtgtacggtttggaagacaggccgccgttcggtaatgcgctcttgagcgcggttacccatcttttggcgatttttgtgccgatgattacgcccgcgctgattgtgggcggcgcgctggaattgccggtggagatgacggcgtatctcgtgtcgatggcgatggttgcgtcgggtgtcggcacttatttgcaggtcaaccgcttcgggccggtcggttcggggatgctgtccatccagtcggtgaatttttcgttcgttaccgtgatgattgcgctgggcgcagggatgaaggagggcggtttgactaaggatgcgatgatttcgacgctcttgggtgtatcgtttgtcggcgcgtttttggtgtgtttctcggcgtggcttttgccgtatttgaaaaaagtgattacgccgacggtcagcggcgtggtcgtgatgctcattggcttgagtttggtacacgtcggtattaccgatttcggcggcggcttcggcgcgaaggcggacggcacgttcggctcgatggaaaacttggggctggcttcgctggtgttgctgattgtgttgatattcaactgcatgaaaaacccgctgttgcggatgagcggcatcgcggtcggtctgattgccggttacattgtcgcgctgtttttgggcaaggtggatttttccgcgctgcaaaacctgccgctggttacgctgcccgtaccgtttaaatacggttttgctttcgactggcacgcatttattgtggcgggcgcgattttcctgttgagcgtgtttgaggcggtcggcgatttgacggcgacggcaatggtgtccgatcagccgattgaaggcgaggaatacaccaaacgcctgcgcggcggcgtgttggctgacggcttggtgtcggtgattgcgacggctttgggttcgctgccgctgacgacgtttgcgcaaaacaacggcgtgattcagatgaccggcgtggcttcgcgccatgtgggcaaatatattgccgtgattttggtgctgttgggtctgttccccgttgtcggacacgcgtttacgacgattccgagtccggtgttgggcggcgcgatggttttgatgttcggcttgattgcgattgcgggcgtgcggattttggtcagccacggcatccgcaggcgcgaagcggtaattgcggcaacgtcggtcggtttgggcttgggtgtcgcgtttgagccggaagtgtttaaaaacctgcctgtcttgttccaaaactctatttccgccggcggcattacggcagtcttgctgaatttggtcttgcccgaagataaaaccgaggcggcggtcaagtttgataccgaccacttggaacactga

SEQ ID NO: 72013 - DNA, 1002 bp, Neisseria meningitidis
  misc_feature 987, 988, 989, 990, 991: 'n' is a, c, g or t
atgaatttccccaaaacagcggcctccctgctgctgcttctcgcctccctcgccgcacacgcgctcgatacgggtcgcattccgcaaaacgaaatcgccgtatatgtccaagagcttgacagcggaaaagtcatcattgaccaccgctcggatgtccccgtcaaccccgcctccacaatgaaactcgttaccgcgtttgccgccttcaaaaccttcggcagcaattaccgctgggcgaccgagtttaaaagcaacggtacggtaaacgacggcacgcttgacggaaacctgtattgggcgggcagcggcgaccccgttttcaatcaggaaaacctgcttgccgtccaacgccagttgcgcgaacaaggcatacgcaatatcacgggacacctgatgctcgaccacagcctgtggggcgaagtcggcagccccgacgatttcgaagccgacagcggttcgccgtttatgacgccccccaatccaactatgctgtctgccggtatggttatggtgcgcgccgaacgcaatgccgccgacagtaccgacatcctcaccgatccgcctttgtcgcatattttcgcccaaaacaacttgaaaattaccgcctcccaagctgcctgcccttcgatcaaaaaactgatgcgtgcatctttttcggacaatacgctgaaattgcgcggcaatattcccgagagctgtttgggcaagcctgtcggtgtccggatgttcgcgcttgacgaactgatccggcaaagttttaccaaccactggctgctcggcggcggacggatttcagacggtatcggcatagccgacacgccggaaggcgcgcagacgcttgccgttgcacacgccaaaccgatgaaggaaattttgacggacatgaacaagcgttcggacaatctaattgcgcgttccgtcttcctcaaactcggcggcgacggcaaactgcccgccgtttccgaacaggcggcgtctgccgtccgnnnnncacacacttaa

SEQ ID NO: 72014 - DNA, 1002 bp, Neisseria meningitidis
atgaaacggaaaatttggctgctgccgctgctggcggtttcggcatacctgcaggcgcagacggaagtcaggctggcggtgcataagtcgttcagcctgcccaaagggctgattgcgcgcttcgagcgggcaaacgatgcgaaagtgtcgattattcaggcgggcggcgcgaacgaaatgctcaacaaactgattttgagccgcgccaacccgattgccgacgcggtgtatggtttggacaacgccaatatcggcaaggcgcgggaaatgggcattttggcggcggcgcaacccgaatccgcccccgtcgcggtcgggctgccttcggctttggcggtcgattacggctatgtggctatcaattacgacaaaaaatggtttgaaggcaaaaagctgcccctgccgcaaaccctgcaggatttgacccgccccgaatataaaaacctattggtcgtaccgtctcccgccacgtcgtccccggggctgggcttcctgatggcgaacatcagcggtctgggcgaagaaggcgcgttcaaatggtgggcacagatgcggcagaacggcgtgaaggtcgccaaaggctggagcgaggcgtattacaccgacttttcgcacaacggcggcgcgtatccgctggtggtcggttatgccgccagtccggcggcggaagtgtatttttccaaaggcaaatacagcgagccgccgacgggcaacctgtttttaaaaggcggcgtattccgccaggtcgaaggcgcggcagtcttgaagggagcgaaacagccgaagctggcggcaaaactggtgcaatggctgcaaagtcgggaagtgcagcaggcggttccgtccgaaatgtgggtttaccccgccgtcaaaaacacgcgcctgcccgacgtgttccgcttcgcccaagccccgacgcacaccaccgcccccgcgcagcgcgatattgatgcgaaccagcgcggatgggtttcccgttggattagaacggttttgaaataa

SEQ ID NO: 72015 - DNA, 474 bp, Neisseria meningitidis
  misc_feature 4, 5, 6, 7, 8: 'n' is a, c, g or t
gtgnnnnnggatgcgggcaagctgacccgccaacgtatcgagcgtttggacaatcaaactgatggcgaaaacgttgatgcattgcgtcgcgaattgcaacgctccgtacaactgcacgccggcgtgttccgtactgatgagattctgagcaaaggcgttcgagaagtcatggcgattgccgagcgtgtgaaacgtaccgaaatcaaagacaagagcaaagtgtggaataccgcgcgtatcgaggctttggaattggataacctaattgaagtggcgaaagcgactttggtgtctgccgaagcacgtaaagaatcacgcggtgcgcacgcttcagacgaccatcctgagcgcgatgatgaaaactggatgaaacatacgctgtaccattcagataccaataccttgtcctacaaaccggtgcacaccaagcctttgagcgtggaatacatcaaaccggccaagcgcgtttattga

SEQ ID NO: 72016 - DNA, 471 bp, Neisseria meningitidis
atgtacgatgtcaatacccacgatgtccgccgctttttcgcccgcgtgtggcagcagcggctcaatccgctgcaactgagcgcactggaacagaaagccctccgcattatcgaagcccatcccgaataccaccgttatctcgaacgcatcgaagaccatctggacaccgactggctgcccgaaaacggcgaaagcaaccccttcctgcatatatcgctgcatttgtccgtccaagaacaggcgggcatagaccagccgcacggcatacgcgcaatccacgacaccctgtgcgccaaacgcggctggctggaagccgaacacgaaatgatggaggcactggcggaaacactgtggacggcgcaacgctacggcaccggtttggatgtcaatttctacatgacccgactgcgcaaactcatcggcttgggtgcagaagatcaagccaggttgaacccgcataaaatcgcctga

SEQ ID NO: 72017 - DNA, 1389 bp, Neisseria meningitidis
atgaacactcgcaccgaacacgacaccatgggcaatgtcgaagtcccgtccgaagcctattggggcgcgcagacccagcgcagccgcaacaatttcaaaatcggcggcgaaaccctgccgcagccgctgatttatgctttggcgctggtgaaaaaagccgctgccgccaccaatgtttccctcggcaggattaagcccgaacaggcggatttgattacgcaggcggcggatgatgtgttgaacggcaggcttgacggacagtttcctttagtggtttggcagaccggctccggcacgcagtccaatatgaacatgaacgaagtgctggcgaaccgcgccaacgaaattgcaggtacaggtttggcggcgtatcagcccgtccatcccaacgaccatgtgaaccacgcgcaatcgaccaacgacgcattcccgaccgccatccacgttgccgccgcgattgaaatcaaccgccacctcatccccgccgtaaaagccctgcgcgacacgttggacaaaaaagcccaagctttcgcccctatcgtcaaaatcggccgcacccacttgcaagacgcgacgccgctgactttgggacaggaattttccggctacgtttcccagcttgatcacggtttaggccgtctgaacgatgcgcttaaagacttgtatgaacttgctttgggcggtacggcggtcggcacgggtttgaacagccatcccgaatacgccgaaaaagctgctgctaaactcgccgaactgtctggcttgccgtttgtcagcgcgccgaacaaatttgaagccttaggcggacgcgatgccgccgttgccgcttcgggcgcattgaaaacgctggcggcaagcctgaataaaatcgccaacgacatccgctggctggcaagcggcccgcgttgcggtttgggcgaaatcaaaatccccgaaaacgagccgggttcgtccatcatgccgggcaaagtcaacccgacccaatgcgaagcaatgacgatggtgtgctgccaagtgttcggcaacgacgttaccatcggtatggcgggcgcgtcgggcaatttcgagctgaacgtctatatgcccgttatcgcctacaacctcttgcaatccatccgcctcttgggcgacgcgtgcaacagcttcaacgaacactgcgccgtcggcatcgaacccgtaccggaaaaaatcgactatttcctgcaccattccctgatgctcgttaccgcgttgaaccgcaaaatcggttacgaaaacgccgccaaagtcgccaaaaccgcctacaaaaacaacaaatcgttgcgcgaaaccgccgttgagctgggcttgctgacgggcgaagaatttgacgaactggtcgttcctgccgatatggttcatccgcgctaa

SEQ ID NO: 72018 - DNA, 909 bp, Neisseria meningitidis
atgaacacgccccaatccgccatcattcccgaccacgcccaagccggcatctttatcgaagccgacttcgccgccaaccgcctcaacgatattaaatccgcctgccgcgcttcgctcgacgcgttatccgccttgaaaacccgctttccggacgatattttgggtctgaccatcgccttcggcagcaaagcctgggcaacattcggacatacggacgaaggcagtgaaatcaaacccttctccgaaatgggcaacgggcttgcgccgtctacgcagcacgatatgtccatccacatccaatccttccgccaaaacgccgcctacgcgcttgcccaatccgttttgggcgcgttcggcgacagcatatgcgtcgcgtccgaagaacacggtttgcgcctgtatcaggatcgcgggctggacggtttcgtcgacggcacggaaaacccgcagggcgatgaaaatgtccgcgaagtcgccatcatccccgaaggaaaacccgatgcgggcggcagctatgtcctgctgcaaaaatacctgcacgatttgaaaaaatgggatgccgtccccgtcgccgaacaggaggcctcggtcggacgcggcaaggaaaccgacgacgaattcggccacgatgtccgcctgcccgattcgcacctcggccgcgtcaacctgaaagaaaacggagtcggcctgaaaatcgtccgccgcagcctgcccttcggcaaaatcagcggcgaacacggtttgatgtttaccgcatactgccgcacgctgcacaatatcgaagcgcaattattgagtatgttcggcgacacggatggcaaaaccgacctgctgctccggcacctctccgccgccgtttcgggcggatactactacgcgccgtctgtcgaacgcctgcaaaacctctaa

SEQ ID NO: 72019 - DNA, 2472 bp, Neisseria meningitidis; identical to SEQ ID NO: 55140

SEQ ID NO: 72020 - DNA, 474 bp, Neisseria meningitidis
atgttatccacagaatccttaaaacaaatcgacatagagttggcgaaatatcctgccgaccaacgccgatccgccattatgggcgcattgcgtattgcccaaaccgaaaaaggctggctcgctcccgaaaccatcgcttttgttgccgactacatcggcatctcgcctgcacaagcctacgaagtcgccactttctacaatatgtacgaccttgagcctgtcggcaaatacaaactgaccgtttgtaccaacctgccctgcgccctgcgcggcggtatggcgaccggcgaatacctgaagaaaaaactcggtatcggctacggcgaaaccacgcccgacggcaaatttacccttgtcgaaggcgaatgcatgggcgcgtgcggcgacgctcctgttatgttgttgaataatcataaaatgtgcagctttatgactgaagaggcgattgagaagaaactggcggagttggagtag

SEQ ID NO: 72021 - DNA, 393 bp, Neisseria meningitidis
atgaacgcgcaaaccggcgccgtcaaactcagtgccatcagcgaacgccaaaacatatccctctcctatctcgagcaattgttcggcaaactccgccgcgccggactggttgaaagcctgcgcgggcccggcggcggctacatcctcgccgcaccggcggcacgcatcaacatcgcccaaatcatcgccgccgccgaagaccggctggacgcgacccaatgcggcagcaaagccaactgccaccacggcgcgccctgcctgacgcacgacctttgggagaatttaaacaaaaccatcaacgactacctcggcagcgttaccctgcaaagcatcatcgaacagaaaaacaacggcgacggcagccgcgtcgtccaatttacacacatccattaa

SEQ ID NO: 72022 - DNA, 543 bp, Neisseria meningitidis; identical to SEQ ID NO: 38476

SEQ ID NO: 72023 - DNA, 4170 bp, Neisseria meningitidis
atgaccgataccgcaccgacagataccgatccgaccgaaaacggcacgcgcaaaatgccgtctgaacaccgccccaccccgccggcaaaaaaacgccgcccgctgctgaagctgtcggcggcactgctgtctgtcctgattttggcagtatgtttcctcagctggctcgccggtacggaatccggtttgcgtttcgggctgtaccaaatcccgtcttggttcggcgtaaacatttcctcccaaaacctcaaaggcacgctgctcgacggcttcgacggcgacaactggtcgatagaaaccgagggggcagaccttaaaatcagccgcttccgcttcgcgtggaaaccgtccgaactgatgcgccgcagcctgcacatcaccgaaatttccgccggcgacatcgccatcgttaccaaaccgactccgcctaaagaagaacgccctccgctcagccttcccgacagcatagacctgcctgccgccgtctatctcgaccgcttcgagacgggcaaaatcagcgcaggcaaagcctttgacaaaccaaccgtctatctcgaacggctggatgcttcataccgttatgacatcaaaggacaccgcctcgacctgaaggctgccgacacgccgtggagcaattcgtcggggtcagcctcggtcggcttgaaaaaaccgtttgccctcgataccgccatttacaccaaaggcggactcgaaggcaaaaccatacacagtacggctcggctgagcggcagcctgaaggatgtgcgcgccgaactggcgatcgacggcggcaatatccgcctctcgggaaaatccgtcatccacccgtttgccgaatcattggataaaacattggaagaagtactggtcaaagggttcaacatcaatccgtccgccttcgtgccttccctgcccgatgccgggctgaatttcgacctgaccgccatcccgtcgttttcagacggcatcgcgctggaaggctcgctcgatttggaaaacactaaagccggttttgccgaccgcaacggcatccccgtccgtcaggttttaggcaactttgtcatccggcaggacggcacggtgcatatcggcaatacgtccgccgccctgctcggacggggcggcatcaggctgtcgggcaaaatcgacaccgaaaaagacatcctcgatttaaatataggcatcaactccgtcggcgcggaagacgtgctgcaaaccgcgttcaaaggcaggttggacggcagcatcggcatcggtggcacgaccgcctcgcccaaaatctcttggcaactcggcatcggcacagcgcgcacggacggcagcctcgccattgcaagcgaccccgcaaacggacagcggaaactggtgctcgacaccgtcaacatcgccgccgggcaaggcagcctgaccgcgcaaggctatctcgagctgtttaaagaccgcctgctcaagctggacatccgttcccgcgcattcgacccttcgcgcatcgatccgcaacttccggcaggcaatatcaacggctcaataaaccttgccggcgaactggcaaaagagaaattcacaggcaaaatgcggtttttacccggcacgttcaacggcgtaccgattgccggcagtgccgacattgtttacgagtcccgccaccttccgcgtgccgccgtcgatttgcggctggggcggaacattattaaaacagacggcggcttcggcaaaaaaggcgaccggcttaacctcaatatcaccgcacccgatttatcccgtttcggtttcggactcgcggggtctttaaatgtacgcggacacctttccggtgatttggacggcggcatccgaacctttgaaaccgacctttccggcgcggcgcgcaacctgcacatcggcaaggcggcagacatccgttcgctcgatttcacgctcaaaggttcgcccgacacaagccgcccgatacgcgccgacatcaaaggcagccgcctttcgctgtcgggcggagcggcggttgtcgataccgccgacctgatgctggacggcacgggcgtgcagcaccgcatccgcacacacgccgccatgacgctggatggcaaaccgttcaaattcgatttggacgcttcaggcggcatcaacagggaacttacccgatggaaaggcagcatcggcatcctcgacatcggcggcgcattcaacctcaagctgcaaaaccgtatgacgctcgaagccggtgcggaacgcgtggcggcaagtgcggcaaattggcaggcaatgggcggcagcctcaacctgcaacacttttcttgggataaaaaaaccggcatatcggcaaaaggcggcgcacacggtctgcatatcgccgagttgcacaatttcttcaaaccgcccttcgaacacaatctggttttaaacggcgactgggatgtcgcctacgggcgaaacgcgcgcggctacctcaatatcagccggcaaagcggcgatgccgtattgcccggcgggcaggctttgggtttgaacgcattttccctgaaaacgcgctttcaaaacgaccgtatcggaatcctgcttgacggcggcgcgcgtttcgggcggattaacgccgatttggacatcggcaacgccttcggcggcaatatggcaaatgcaccgctcggcggcaggattaccgcctcccttcccgacttgggcacattgaagccctttctgcccgccgccgcgcaaaacattaccggcagcctgaatgccgccgcgcaaatcggcggacgggtcggctctccgtccgtcaatgccgccgtcaacggcagcagcaactacgggaaaatcaacggcaacatcaccgtcgggcaaagccgctctttcgataccgcgcctttgggcggcaggctcaacctgaccgttgccgatgccgaagtattccgcaacttcctaccggtcggacaaaccgtcaaaggcagcctgaatgccgccgtaaccctcggcggcagcatcgccgatccgcacttgggcggcagcatcaacggcgacaaactctattaccgcaaccaaacccaaggcatcatcttggacaacggctcgctgcgttcgcatatcgcgggcaggaaatgggtaatcgacagcctgaaattccggcacgaagggacggcggaactctccggtacggtcggtatggaaaacagcggacccgatgtcgatatcggcgcggtgttcgacaaataccgcatcctgtcccgccccaaccgccgcctgacggtttccggcaacacccgcctgcgctattcgccgcaaaaaggcatatccgttaccgggatgattaaaacggatcaggggctgttcggttcgcaaaaatcctcgatgccgtccgtcggcgacgatgtcgtcgtattaggcgaagtcaaaaaagaggcggcggcaccgctccccgtcaatatgaacctgactttagacctcaatgacggcatccgcttcgccggctacggcgcggacgttaccataggcggcaaactgaccctgaccgcccaatcgggcggaagcgtgcggggcgtgggcacggtccgcgtcatcaaagggcgttataaggcatacgggcaggatttggacattaccaaaggcacggtctcctttgtcggcccgctcaacgaccccaacctcaacatccgcgccgaacgccgcctttcccccgtcggtgcgggcgtggaaatattgggcagcctcaacagtccgcgcattacgctgacggcaaacgaaccgatgagtgaaaaagacaagctctcctggctcatcctcaaccgcgccggcagtggcagcagcggcgacaatgccgccctgtccgcagccgccggcgcgctgcttgccgggcaaatcaacgaccgcatcgggctggtggatgatttgggctttaccagcaagcgcagccgcaacgcgcaaaccggcgaactcaaccccgccgaacaggtgctgaccgtcggcaaacaactgaccggcaaactctacatcggctacgaatacagcatctccagcgcggaacagtccgtcaaactgatttaccggctgacccgcgccatacaggcggttgcccgtatcggcagccgttcgtcgggcggcgagctgacatacaccatacgtttcgaccgcttctccggttcggacaaaaaagactccgccggaaacagcaaaggaaaataa

SEQ ID NO: 72024 - DNA, 1230 bp, Neisseria meningitidis; identical to SEQ ID NO: 47750

SEQ ID NO: 72025 - DNA, 582 bp, Neisseria meningitidis; identical to SEQ ID NO: 37500

SEQ ID NO: 72026 - DNA, 1065 bp, Neisseria meningitidis
atggaaaaagaattcaggatattaaatatcgtatcggccaagatttggggtgggggcgaacaatatgtctatgatgtttcaaaagcattggggcttcggggctgcacgatgtttaccgccgtcaataaaaataatgaattgatgcacagacgcttttccgaagtttcttccgttttcacaacgcgccttcacacgctcaacgggctgttttcgctctacgcacttacccgctttatccggaaaaaccgcatttcccacctaatgatacacaccggcaaaattgccgccttatccatacttttgaaaaaactgaccggggtacgcctgatatttgtcaaacataatgtcgtcgccaacaaaaccgatttttatcaccgcctgatacagaaaaacaccgaccgctttatttgcgtttcccgtctggtttacgatgtgcaaactgccgacaatccctttaaagaaaaataccggattgttcataacggtatcgataccggccgtttccctccctctcaagaaaaacccgacagccgtttttttaccgtcgcctacgccggcaggatcagtccggaaaaaggattggaaaacctgattgaagcctgtgtgatactgcatcggaaatatcctcaaatcaggctcaaattggcaggggacggacatccggattatatgtgccgcctgaagcgggacgtatctgcttcaggagcagaaccatttgtttcttttgaagggtttaccgaaaaacttgcttcgttttaccgccaaagcgatgtcgtggttttgcccagcctcgtcccggaggcattcggtttgtcattatgcgaggcgatgtactgccgaacggcggtgatttccaatactttgggggcgcaaaaggaaattgtcgaacatcatcaatcggggattctgctggataggcttacgcctgaatctttggcggacgaaatcgaacgcctcgtcttaaaccccgaagcaaaaaacgcactggcaacggcagctcatcaatgcgtcgccgcccgttttaccatcaaccataccgccgacaaattattggatgcaatataa

SEQ ID NO: 72027 - DNA, 1524 bp, Neisseria meningitidis; identical to SEQ ID NO: 60744

SEQ ID NO: 72028 - DNA, 2130 bp, Neisseria meningitidis
atggcctatcaagttctcgcccgaaaatggcggcccaaaaccttttccgacttagtcggtcaggaacacgtcgtcaaagccctgcaaaacgctctagacgaaggcaggctgcaccacgcctacctgctgaccggtacgcgcggcgtaggcaaaaccaccattgcccgcatccttgccaaaagcctcaactgcgaaaacgcgcaacacggcgaaccttgcggcgtatgcgaaagctgtacgcagatcgatgccggacgctacgtcgacctgctggaaatcgacgccgcctccaacacaggcatcgacaacatccgcgaagtattggaaaacgcccaatatgcaccgactgccggcaaatacaaagtctatatcatcgacgaagtgcatatgctttccaaaagcgcgttcaacgctatgctcaaaacgctggaagagccgcccgaacacgtcaaattcatccttgccacgaccgatccgcacaaagtccccgttaccgtattaagccgctgcctgcaattcgtcttacgcaatatgaccgcgcagcaggttgccgaccacctcgcccacgtcctcgacagcgaaaaaatcacctacgccccccccgccctgcaacttttgggacgcgccgccgccggatcgatgcgcgatgccttgagcctgctcgaccaagccatcgccctgggttcgggcaaagttgccgaaaacgatgtccgccaaatgatcggcgcggttgacaaacaatacctttacgaactgctgacaggcatcatcaaccaagacggcgcagccctgctcgccaaagcgcaggaaatggcggcgtgtgccgtcggctttgacaacgccttgggcgaactcgccatactgctgcaacacctcgccctgatacaggcagtgccgaatgccttggcgcacgacgaccccgattccgatattttgcaccgcctcgcccaaaccataagcggcgaacaaatccagctttactaccaaatcgccgtccacggcaaacgcgacctgagcctcgcccccgacgaatacgccggctttatgatgaccctgctgcgtatgctggcgtttgcgcccttggcggcagcttcgtgtgatacaaacgccgtgattgaaaataccgaactaaaatccccatcggcacaaaccgccgaaaaggaaaccgccgtaaaaaagccccaaccgcgccctgaagcagaaaccgcccaaacacccgttcagacggcatccgcagcggcaatgccgtctgaaggcaaaactgccggacccgtttccaatcaagaaaacaacgatgttccgccttgggaagacgcgccagacgaagcccaagccgcagccggcacggcgcaaacgtcggcaaaaagcattcagacggcatccgaagccgaaacgccgcccgaaaaccaagtttccaagaacaaggcagccgacaacgtaaccgatgcccccttgtccgaagtgccgtctgaaaaccccattcaggcaacaccgaatgatgaagccgttgaaacggaaacatttgcacacgaagcccctgcagaacctttctacggttacggctttccggataatgactgccccgtagaagacggcgcagaaatcccgccgcccgattgggaacacgccgcccctgccgataccgcaggcggaggcgcggacgaagaagcagaagcaggcggcatcggcggaaacaacacgccgtccgccccgccgcccgaattttccaccgaaaactgggcagccatcgtccggcatttcgcccgcaaactcggcgcggcgcaaatgccggcgcaacactccgcgtggacggaataccatcccgacaccggcctgatggttttggcgatgaccgccgaagcccgcgccaccgccgacaaaaaacgtctcgacaaaatccgcgacacccttgcccaagcctacggactgcaactcaccctgcaaacccaagactggcgcgacgaagccggcagggaaacccccgcgatgcaggacaagcgcgtccaagccgaagacaggcaaaaagcacaagcattgctcgaagccgaccccgccgcacaaaaaatcctccaagcattcggcgcgcaatggcagcccgaatcactggaattggcagcaaaccggccgtaa

SEQ ID NO: 72029 - DNA, 798 bp, Neisseria meningitidis; identical to SEQ ID NO: 58539

SEQ ID NO: 72030 - DNA, 660 bp, Neisseria meningitidis; identical to SEQ ID NO: 54572

SEQ ID NO: 72031 - DNA, 1584 bp, Neisseria meningitidis
atgccgaacaaaaagaaaaaagccgcctttgcgcgtgctgcaacggagaacggtgtgccggacgtgtccaacatcaaaaattcatatgatgatttgatgtatgaatccaaagcattttcccaaaccgccatcaacgccttggaggctcgcgcccgcatgatgggcctgaagcctgcagcagcggcaaaagccaaggtcttggagctgggctgttcgatgggcggcaatatcatcacgcaggctctttattacccggatgcggaatttgtcggtatcgacttgtccggcaggcaggttgcgcagggcaacgccatcattgaaaaaatgggcttgaaaaatgtgcgtctggaagaaaaagatattttgaccatcgatgagtcattcgggaagtttgactatatcatcgtccacggcatttggtcgtgggtgcctgacgcagttaaagacaaaattttttcgatttgccggaacaacctgaccgaacacggcattgcctatatttcatacaatgtttaccccggctggaaacggcaggagcagttgcgcgaaattatgtactttgccggcagggatgtgcttgaagaacccttggaagcgcggacgcggaaaggcttggacgcgctcaaggcgctggcggaaattttggaaaacgacaaaggcttgggcggcggcggcaaacttccggcgattcaaaaaatattgaatcacaatacttattatgtcgcacacgaatatatggaaatattcaacgacccgatttacgttaacggcttcatcgaatgggcaaaccgccaccggctggcgtatatcggggataccgatttgcacgtgtcttttgtttcttggatggcggagcatacgcgggagcggattttggcattggcaggggatgattatattgccaaagaattttatagcgatattttatccgaccgccaattccgccgttcgcttttatgccgtgaggaagtcggggatactgtcaggcgtgacgagtcggttgccgtcgaagtgatagaaagtttgaatttccgcccggcaagaggggaaacaatcaactttgatgaaaacgataccctgctttcgggcatacgcgatgtgatgaaaaccggagagccgtttaaaacggaagatgttgcggaaaatctcgcccgccgatttcccggtctggaatttgaccgcatgaaaatcaattcccagcttttattgcaaaccattctcgggcgtttttctgtttcatcagacaatgcgggcaaacaattttttgaagaccataaaacctatgtgccggcgcgttttacagattatgtcgccgcctttgtggaacacggcgcggaagcatttgtccagcctgccaaccgttacaacgaaagcaccccctcattcgggtacgggcatttgtacattatgcggcaattgtcgcggccgacgagcaaacaggcattgattgaaacggttgccgaaaacttgaacatcgtcagcaccacgcccgacggtttgacattccatccgcctgccgaagtgtatgtggaagaaatattggcagacttggcagacaggcattttctcgtttcggcggattga

SEQ ID NO: 72032 - DNA, 180 bp, Neisseria meningitidis; identical to SEQ ID NO: 39090

SEQ ID NO: 72033 - DNA, 3435 bp, Neisseria meningitidis
atgaccgagccgacctacatccccctgcgcctgcataccgagttctcaattaccgacggtatggtgcggattaaaaaactgattgccaaagcgcaggaatacggtttgcctgctttgggcatcagcgatttgatgaacgaattcggtttggtgaaattctataaagcctgccgcggcgcagggattaagcccatcggcgcggcggacgtgtggataggcaatccgaatgcgcccgacaagccgttccgcgctatgctgattatccgcaacgatgcgggctatctgcgtttgagcgagcttttgacagaggcctatgtcggcaaagaccgcaatatccatcatgcggaactcaaccccgaatggctggaaaacggcgacaacagcggcttgatttgtttgagcggcgcgcattacggcgaagtgggcatgaatctgttgaacggcaatgaagacgcggcgcgcgcggcggcgttgaaatatgcggcatggtttcccgatgcgttttatttagagctgcaacgcctgcccgaacgccccgaatgggaggcttgcgtttccggcagcgtgaagctggcggaggaattgggtttgccggtggtggcgacgcatccgacacagtttatgagccgcgacgatttcaacgcgcacgaggcgcgagtgtgtatcgcaggcggctgggtattgacggacaagaaacgtccgcacgatttcacgccgggccagtttttcattccgccggaaaccatggccgaacgtttcgccgatttgcctgaagccttggaaaacacggtagaaattgccaaacgctgcaacctgcacatcacattgggcaaaaacttcctgccccttttccccacgcccgacggtttatcactcgatgactatctcatcaaactctccaacgagggtttgcaggaacgtatggttcagctttatcccgacgaggcggagcgggcggcgaaaatgccggaatatcaaaaacggctggattttgagctgaacatcattatccagatgaaattccccggctatttccttatcgtacaagactttatcaactgggcgaaaacacacggctgtccggtcgggccgggccgtggttcgggcgcgggttcgctggtggcgtattcattgaagattaccgaccttgatccgctcaaatacgcgctgctgttcgagcgtttcctaaaccccgaacgcgtttctatgcccgacttcgacgtggacttttgccaaagcaaccgcggccgcgtgattgaatatgtgcgcgagaaatacggcgcggaggcggtcagccagattgttaccttcggcacgatgtcgtccaaagcggtcatccgcgacgtcgggcgcgtgttagagctgccgtttatgctgtgcgacaaactgtccaagctgattccgttggaagccaacaaacccctgagtttggaaaaagccatggagaccgagccgcagatccaggaattgatcgaagcggaagaagcggacgaactgattacgctggcgaaaaagctggaagatttaacgcgcggtttgggtatgcacgcaggcggcgtgttgattgcgccgggcaagatttccgattacagccccgtgtatcaggcggacgaatccgcctcgcccgtatccatgtacgacaagggcgacgtggaagatgtgggtttggtgaaattcgactttttgggtctgcgcaacctgaccattatcgaaatggcgcaggacaacatcaaaaacactaccggcgacatcatcgatgtcggcaaaatcccgcttgacgaccaggtcgcctaccaaatcttccgcgatgcgaacaccaccgccgtcttccagttcgagtcgaccggcatgaaaaaaatgctgaaaacggcgcacacgaccaagtttgaagaactcatcgccttcgtatcgctctaccgccccggcccgatggacaacattcccgacttcgtcgcacgtatgaaggggcaagaattccaatacatccatccgctactcgaaggcatcctcgcgccgacctacgggattatggtgtatcaggaacaagtgatgcaggcggcgcaaattatcggcggttactcgctcggcggcgcggacttgttgcgccgcgccatgggtaagaaaaagcccgaagaaatggtgaaacaccgcgaaatcttcgccgaaggcgcggcaaaacaaggcatttcgcgcgaaaaatccgacgaaatcttcaactacatggaaaaattcgccggctacggtttcaacaaatcccacgccgccgcctacgccctgatttcctaccagaccgcatggctcaaagcccactaccccgccgaatttatggcggcgaccatgtcgtccgaattggacaacaccgaccagctcaagcatttctacgacgactgccgtgccaacggcatcgagttcctgccgcccgacatcaacgaatccgactaccgcttcacgccgtatccagacatgaaaatccgctacgcactcggcgcgattaaaggcacgggcgaagccgccgtcgaatccatcatcgccgcgcggcaaagcggcggcaagtttaccggcctcttggacttctgcgagcgcgtcggcaaagaacacatgaaccgccgcaccctcgaggccctgatacgcggcggcgcgttcgacagcatcgaacccaaccgcgccatgctcttggcgaacatcgacctcgctatggacaacgccgaccaaaaagccgccaacgccaatcagggcgggcttttcgacatgatggaagacgccatcgaaccggtgcggctcatcgacgcgccgatgtggagcgaatcggaaaaactcgccgaagaaaaaaccgtcatcggcttttacctgtccggccacccgttcggcccgtatgcccaagaagtccgccaaatcgccccgcagaaactgtcgaaactcaaaccgcaagacagcgtgcgcctcgccggattcgttaccgccgtacgcaccatgatgggcaagcgcggcaaaatcgccttcgtcagccttgaagatttgagcggacaggttgaaatcatggtcggcggtcagacgttggaaaactgcgccgactgcctcaaagccgaccaagtgctgattatcgaatccaaagtcagccgcgacgactacggcggcggcgacgggctgcgtattctggcaaaccaagtcatgaccctgcaaatggcgcgcgaacgctacgcccgaagcctcagcctcgccctcgccccgcatcacgacatcggcaaactggtacaactgctcgccgcccaccaactgcccgacacgccgcgcatcccgctgcaactgtcgtatgccaacgaaaaagcgtcgggcaggcttcaagtgccgccgaaatggacggttacgccgagttccgcattgttcggcgaactggaaacattgctcggcagccggtcggtgcgcgtcaactggtaa

SEQ ID NO: 72034 - DNA, 1458 bp, Neisseria meningitidis; identical to SEQ ID NO: 60500

SEQ ID NO: 72035 - DNA, 600 bp, Neisseria meningitidis; identical to SEQ ID NO: 39034

SEQ ID NO: 72036 - DNA, 414 bp, Neisseria meningitidis
  misc_feature 391, 392, 393, 394, 395: 'n' is a, c, g or t
atgaaagaactagataaaatcgatttccgcattcttaagatccttcaacagaatgcccgcatcccgatgacggagcttgccgagaaggtaggcttgtccaccacgcccgttacagagagggtgcgccgtttggagcgggaacattatatttccggctatcacgcccacctcaatccccatctgttgggcaaaccactattggtttttgtcgagctgaagctgcaatccaaatcgggcaatattttcgaagatttcaaaaaagaagtgctgaaaattccgcaaattatggaatgccacttggtgtcgggcgaatacgactatctgattaaagtacgtttgcccgatatgtctgcctatcgggatatgctaggcaatatcctattgcaactgnnnnncacacacttaattaattaa

SEQ ID NO: 72037 - DNA, 468 bp, Neisseria meningitidis; identical to SEQ ID NO: 54622

SEQ ID NO: 72038 - DNA, 1083 bp, Neisseria meningitidis
atggttgccaacaatgtgcgcggtgtggagtttatcagtgccaatacggatgcgcagtctctggcaaaaaaccatgcggcgaagagaatccagttgggtacgaatctgacacgcggtttgggcgcgggcgcgaatcccgatatcggccgtgcggcagcccaggaagaccgggaagccattgaagaagccattcgcggtgcgaatatgctgtttatcacgaccggtatgggcggcggtaccggtaccggttccgcgccggttgttgctgagattgccaagtctttgggcattctgaccgttgccgtggttacccgaccgttcgcatatgaaggtaagcgcgtccatgtcgcacaggcagggttggaacagttgaaagaacacgtcgattcgctgatcatcatcccgaacgacaaactgatgactgcattgggtgaagacgtaacgatgcgcgaagccttccgtgccgccgacaatgtattgcgcgatgcggtcgcaggcatttccgaagtggtaacttgcccgagcgaaatcatcaacctcgactttgccgacgtgaaaaccgtgatgagcaaccgcggtatcgctatgatgggttcgggttatgcccaaggtatcgaccgtgcgcgtatggcgaccgaccaggccatttccagtccgctgctggacgatgtaaccttggacggagcgcgcggtgtgctggtcaatattacgactgctccgggttgcttgaaaatgtccgagttgtccgaagtcatgaaaatcgtcaaccaaagcgcgcatcccgatttggaatgcaaattcggtgcggctgaagacgagaccatgagcgaagatgccatccggattaccattatcgctaccggtctgaaagaaaaaggcgcggtcgattttgttccggcaagggaggtagaagcggttgccccgtccaaacaggagcaaagccataatgtcgaaggtatgatccgcaccaatcgcggtatccgcacgatgaaccttaccgctgcggatttcgacaatcagtccgtacttgacgactttgaaatccctgcgattttgcgtcgtcaacacaattcagacaaataa

SEQ ID NO: 72039 - DNA, 567 bp, Neisseria meningitidis; identical to SEQ ID NO: 37645

SEQ ID NO: 72040 - DNA, 567 bp, Neisseria meningitidis; identical to SEQ ID NO: 46235

SEQ ID NO: 72041 - DNA, 348 bp, Neisseria meningitidis; identical to SEQ ID NO: 54695

SEQ ID NO: 72042 - DNA, 2019 bp, Neisseria meningitidis; identical to SEQ ID NO: 54538

SEQ ID NO: 72043 - DNA, 867 bp, Neisseria meningitidis
atgaaagcaaaaatcctgacttccgttgcactgcttgcctgttccggcagcctgtttgcccaaacgctggcaaccgtcaacggtcagaaaatcgacagttccgtcattgatgcgcaggttgccgcattccgtgcggaaaacagccgtgccgaagacacgccgcaactgcgccaatccctgctggaaaacgaagtggtcaacaccgtggtcgcacaggaagtgaaacgcctgaaactcgaccggtcggcagagtttaaaaatgcgcttgccaaattgcgtgccgaagcgaaaaagtcgggcgacgacaagaaaccgtccttcaaaaccgtttggcaggcggtaaaatatggcttgaacggcgaggcatacgcgctgcatatcgccaaaacccaaccggtttccgagcaggaagtaaaagccgcatatgacaatatcagcggtttttacaaaggtacgcaggaagtccagttgggcgaaatcctgaccgacaaggaagaaaatgcaaaaaaagcggttgccgacttgaaggcgaaaaaaggtttcgatgccgtcttgaaacaatattccctcaacgaccgtaccaaacagaccggtgcgccggtcggatatgtgccgctgaaagatttggaacagggtgttccgccgctttatcaggcaattaaggacttgaaaaaaggcgaatttacggcaacgccgctgaaaaacggcgatttctacggcgtttattatgtcaacgacagccgcgaggtgaaagtgccttcttttgatgaaatgaaaggacagattgccggcaaccttcaggcggaacggattgaccgtgccgtcggtgcactgttgggcaaggcaaacatcaaacctgcaaaataa

SEQ ID NO: 72044 - DNA, 585 bp, Neisseria meningitidis; identical to SEQ ID NO: 56076

SEQ ID NO: 72045 - DNA, 1956 bp, Neisseria meningitidis
  misc_feature 1941, 1942, 1943, 1944, 1945: 'n' is a, c, g or t
atgacagaaaaatcccataaaaaaacagcaaaaggcagggcgggaagcccgtccccaacgtccgcacgcaacaagaaagccgacaacggcgcacggggcaataaagtttccgagcggctcaaggcggtcaaagagttgcagaaaaccgaaaccaaaaaggcgcgtcccgaacatgtcgtcaaccttatcggcgacgcactgtggctgatgggtttggcggcaaccctgtatttggcgatttccctgatcagtttcgatatgggcgatccgtcttggtcgcacagttcgccggttgtggaagatgtcgccaattggggcggactgttcggcgcgtatgttgccgatgtcggctattatcttttcggctggtcgttctggtggtggatagcggctgcctgcgttgtgctgtataaaaatttccgcctgcacgcaaaacagacggaaaacgaggcatacaaccacaaaatcgctgccgccgcgctgtttgtcctgacggtcttcagccccgtcttggagtattttgtgctgggcggaaaatatgccgactccctgcctgtcggagcaggcggtatggtcggcatacgcgtcggcgcagtgtttgcgtggctgctggggaaatcgggcagcctgctgattatcttggttgttctgctgttgtcgttgtccctactggtgcagatttcatggctggaatttttgaacggtgcaggcagggcggttcaaaaccgcctgagtgccttatccggcaaggtcatggctttaggaaaacgccggccgaataccaaaacagacggtgtcgatacccaaaatacacggcgcatggtaaaagaagccaagaatattacggccaaacccgttgccttgcccgaaggcagcagcagcaaccgcaaatccgtcgcggtttccgtcgcgccgccgcccaaaattcaggtttctctgtttgaagatgacgaacctcggcaggcgggcgaataccacaagcctacattgaacctattgcggattcccgacagcgagcccgtcagcatcaatcccgccgaattggagcgcactgccgaactaatcgaatccaagctggcagaattcggcatcggcgtacaagtcgtatccgccacatccggccccgtcatcacgcgctacgaaatcgaacccgcgcaaggtgtcaaaggcagccaaattgttgccttgtcgaaagatttggcacgctctatgtcgctgcaatccgtgcgtatcgtcgaaaccatcgccgggaaaaacacgatgggcatcgagttgcccaacgacaaacgccaagacgtgatgttgagcgaaatcttgtcctcgcccgtgtttgccgaagccaaatccaagctgaccgtcgcgctgggcaaagacattgccggtacccccgttgtcggcgacttggcgaaaatgccgcaccttttggtcgccggtatgactggttcgggcaagtccgtcggcgtgaacggcatgattatgtctatgcttttcaaagctacgcccgacgaagtccgcttcattatgatagacccgaaaatgctcgagttgagcatttacgacggcattccgcacctgctctgtcccgtcgtgaccgatatgcgcgaagcagggcaggcgttgaactggtgcgtcgccgaaatggaaaaacgctaccgcctgctttcccacgccggtgtacgcaatctggaaggcttcaaccaaaaagtcgaagccgcaaaagcggcaggcaagcctttgcttaatccgttcagcctgaaccccgacgagcccgagccgctggaaaaactgccgttgattgtggtcgttatcgacgaacttgccgacctgatgatgaccgaacgcaaagccgtcgaacagcaaatcgcccgtctcgcccaaaaagcgcgcgccgccggtatccatatgattgtcgcgacccaacgtcccagtgtcgatgtcgtnnnnncacacacttaa

SEQ ID NO: 72046 - DNA, 963 bp, Neisseria meningitidis; identical to SEQ ID NO: 61100

SEQ ID NO: 72047 - DNA, 438 bp, Neisseria meningitidis; identical to SEQ ID NO: 50946

SEQ ID NO: 72048 - DNA, 1713 bp, Neisseria meningitidis; identical to SEQ ID NO: 61713

SEQ ID NO: 72049 - DNA, 588 bp, Neisseria meningitidis
atggaacataagctgccgcaactgccttatgaaccggacgcattgtccccgcatctgagcaaagagactttggaattccactacggcaaacaccatcaaacctacatcaccaacctgaacaatcaaatcaaaggtaccgaatttgaaaacctacctttggaagagattgtgaaaaaatcttcgggcggcgtgttcaacaacgcggcacaaacttggaaccacaccttctactggctgggtttcacgcccaaaggtcaaggcaaaccttccggcgaactggccgccgccatcgacgcgaaatggggcagcttcgagaaattccaagaagcgttcaatgcctgcgctgccggtactttcggctccggttgggcatggctggtgaaaacccctgccggcggattggatttggtttccacttccaacgcagcaactccgctgaccactgaaaacacgccgctgctgacctgcgacgtgtgggaacacgcctattacatcgactaccgcaacagccgccccaactacctgaaaggtttttgggaaatcgtcaactggaacgaagtcgccaaacgcttcgccgccttgtcctga

SEQ ID NO: 72050 - DNA, 684 bp, Neisseria meningitidis
atgccgtctgaaaaatgttcagacggcatttcttataacctttcgtttgcagcacataaccaatcagtctttcctattccgttccgaaatgcataccatgcgcccgtacccaatatttgcgaacaaggaaagaaaatggcacgtttaaccgtacacaccctcgaaaccgcccccgaagccgccaaagcgcgcgtcgaggcggtacttcaaaacaacggctttatccccaaccttatcggcgtattatcaaacgcccccgaagccttggcgttttaccaagaagtcggcaagctcaacgccgccaacagcctgaccgccggcgaagtcgaagtaatccagattattgccgcccgcaccaaccaatgcggcttctgcgtggcagggcacaccaaactcgcaaccctgaaaaaactcctttccgaacaatccgtcaaagccgcgcgcgctttggcggcaggcgaatttgacgatgctaaactcggcgcgctcgccgcctttacccaagccgtaatggcaaaaaaaggcgcggtatccgacgaggaactcaaagcattttttgatgctggctacaaccagcagcaggcagtcgaagtcgtgatgggcgtagccttggcaactttgtgcaactacgtcaacaacctcggacaaaccgaaatcaaccccgaattgcaggcttacgcctga

SEQ ID NO: 72051 - DNA, 1569 bp, Neisseria meningitidis; identical to SEQ ID NO: 54457

SEQ ID NO: 72052 - DNA, 780 bp, Neisseria meningitidis
atgagcgcaaccattcccccaaaaatcatccgatacgacagcaatccgaccgatgtctattttttcggcacttgcgtccttgatctttttatgcccgaagcaggcatggatgccattgccctaatcgagcagcagggcatacgcgtccatttcccgatggcgcaaagctgctgcggtcagcccgcctattcatccggccatccgaccgaagcctttgatgtcgccagagcgcaactcgaccttttccccgaggagtggccgattgtcgtaccgtccggttcgtgcggcggtatgatgaagcaccattggccgacgctgtttaaaggcagcgagtacgaggaaagggctgtggattgcgccggccgcatcatcgagtttacccatttcctgcttgccatcggtttcaaacccgaagacaagggcgaaccgctcaaagtcgccgttcacacttcctgcgccgcccgccgcgaaatgaatgtccatctttcaggctggcaactgattgacggtatggaaaacgtcgaacgcatcgtccacgaccacgaaagcgaatgttgcggcttcggcggcacattctccgtcaaacaagccgatatttccggcgcgatggtaaccgacaaagtcgccgcgctgaaagaaaccggcgcaaccgaaatcatcagcgcggactgcggctgtatgatgaacatcggcggcaaaattgctaaggacgaaccgaatatgccgcgtccgaaacatatcgcatccttcttgttggaacgtaccggaggcaaagcatga

SEQ ID NO: 72053 - DNA, 495 bp, Neisseria meningitidis; identical to SEQ ID NO: 61091

SEQ ID NO: 72054 - DNA, 201 bp, Neisseria meningitidis; identical to SEQ ID NO: 37363

SEQ ID NO: 72055 - DNA, 888 bp, Neisseria meningitidis
atgtacacaggacgtttcgcccccagcccgaccgggctgctccacatcggctcgctgctgaccgccgccgcttcctatgccgatgcacgctcaaacggcggcaaatggctggtccgcatggaagacctcgatccaccgcgcgaaatgccgggggcggcaagccatatcctgcacacgcttgaggcattcggattcgagtgggacggagaagtcgcctatcagagccgccgttacgccctgtatgaagaaaccctatgccgcctgaaaaccgccggactggtctatccctgccattgcagccgcaaagactggcaggccggggcaaggcggggcgcagacgggttcgtctataacggacgctgccgccaccccggtcaacgccctgcaccgcaaggcaaacagccggcgtggcgcatccgcgtccccgaccgcgttatcggtttttcagacggcatcgtcggcggttacgcccaaaacctcgccggcgacatcggcgatttcgtcctgcttcgtgcagacggttactgggcataccaactcgccgtcgttgccgacgatgccgaacagagcgttacccacatcgtccgcgggcaagacctgctcgtttctacgccgcgccaaatctatttgcagcagtgtttgggcgttccaacacctcaatatgcccacctgccgctgctgaccaacgcgcaagggcagaaatggtcgaaacagacgctcgcccccgcattggatttaaaccgccgcgaacaactcctccgccaagtgttccgttacctcaagctgcccgaagcaccggaaaccgaccgccctgccgaactgctcgactgggcggtggcacactgggatatgggcaaagtgccgaaacacgccgttaccaccccctga

SEQ ID NO: 72056 - DNA, 525 bp, Neisseria meningitidis
atgaacaatctgattcccgaacatttagccgcctatgcacatagtgacagcctgcaaattgaaggcgtgcatcgttgcttttcattatcctgccaaggtagagatactttccacatccgttactatggagagccttttgacggattgattaccgatactgataaggctccggtaaaaattgtggcggtagaagctgtaagcggcgatgaaatcgtattgtttgatggcgcggaacatggctataacgctatgttttgcgacaaatatagcccaaatcaaaagcaaaacagaatgttaactgatttggatgagtatacttaccgagttctgattcatctttattacaatatagactatgaagatgaatatgaagatttcgtcaattctgaaggacaagttcccttaattgatggtcgcgtcattagttttgactcattaaaacgaaatggctttgatgcaatcagcgttgatctaattgatgaaaaacaatctgttcgtgaattattgaatgaagaattaagctaa

SEQ ID NO: 72057 - DNA, 1002 bp, Neisseria meningitidis; identical to SEQ ID NO: 56034

SEQ ID NO: 72058 - DNA, 630 bp, Neisseria meningitidis; identical to SEQ ID NO: 38660

SEQ ID NO: 72059 - DNA, 324 bp, Neisseria meningitidis; identical to SEQ ID NO: 55651

SEQ ID NO: 72060 - DNA, 753 bp, Neisseria meningitidis; identical to SEQ ID NO: 54232

SEQ ID NO: 72061 - DNA, 1542 bp, Neisseria meningitidis
atgaccgaaatgcaacaacgcgcccaactgcaccgccaaatttggaaaattgccgacgaagtacgcggcgcggtggatggctgggactttaaacaatacgttctcggcacacttttctaccgctttatcagcgaaaacttcaccgactatatgcaggcaggcgacagcagtattgattacgccgctatgccggacagcatcatcacgcccgaaatcaaagacgatgccgtcaaagttaaaggctatttcatctaccccagccagcttttttgcaatattgccgccgaagcccatcaaaacgaagagctcaacaccaagctgaaagaaatctttaccgcgattgaaagctccgcctccggctatccgtccgaacaagacattaaaggcctgtttgacgacttcgataccaccagcagccggctcggcagcacagttgccgacaagaacaaacgccttgccgccgtcctcaaaggcgtggcggaacttgatttcggcagttttgaagaccaccacatcgaccttttcggcgatgcctacgaatacctgatttccaactacgccgccaacgcaggcaaatccggcggcgaatttttcaccccgcaaagcgtatccaagctgattgcgcggctggcggtgcacgggcaggagaaagtaaacaaaatctacgacccagcttgcggctcgggcagcctgctcttgcaggcgaaaaaacagtttgacgagcacatcatcgaagaaggcttcttcgggcaggaaatcaaccacaccacctacaacctcgcccgcatgaatatgtttctgcacaacgtcaattacaacaaattccacatcgaattgggcgacacactgactaatcccaagctcaaagacagcaaaccctttgatgccatcgtttccaatccgccttattccatcaactggataggcagcgacgaccccaccttaatcaacgacgaccgctttgcccccgcaggcgtactcgcaccgaaatccaaagccgattttgccttcatcctgcacgcactgaactacctttccggcagaggccgcgccgccatcgtctctttccccggtattttctatcgcggcggcgcagagcagaaaatccgccaatatctggtggagggcaactacgtggaaaccgtgattgcccttgcgcccaatctcttttacggcaccggcatcgccgtcaatatcctggttttgtccaaacacaaagacaataccgacatccaatttatcgacgcaggcagcttctttaaaaaagaaaccaacaacaacgtcttaaccgaagaacacattgccgacatcgtcaaactcttcgccgacaaagccgatgtgccgcatatcgcccaaaacgctgcccagcaaaccgtcaaagacaacggctacaacctcgccgtcagcagctatgttgaacccgaagacacacgcgaaattatcgacatcaaacagcttaacgccgaaatcggcgaaaccgtcgccaaaatcgaacggctgcggcgcgaaattgacgaagtgattgcagagattgaggcctag

SEQ ID NO: 72062 - DNA, 309 bp, Neisseria meningitidis
ttgagcggcatcaacataaacctcaaaaacggcgattccctgctgatacgcggcccgagcggttgcggcaaaacctcgctgttgcgcgcgctggcggggctttggccgttcggcagcagcggcaaagtcagccgtccgccgcatcaagacatcctctccctgccgcaacgcccgtacacggcacagggcagcctgcgcgacgcggtttgttatccggacatcgacaaacagcatcccgagttagccgaagccatgaacacctgccgcttgggttatctgattgacaaattggacaaaacagacgactga

SEQ ID NO: 72063 - DNA, 1008 bp, Neisseria meningitidis; identical to SEQ ID NO: 44166

SEQ ID NO: 72064 - DNA, 699 bp, Neisseria meningitidis
gtgcaggcggatttagcctatgccgccgaacgcattacccacgattatccgaaaccaaccggtacagacaaagacaaaataagcacggtaagcgattatttcagaaacatccgtgcgcattccatccacccccgggtgtcggtcggctacgacttcggcgactggaggatagcggcagattatgccagttacagaaaatggaacaacaataaatattccgtcaacacaaaagagttgcaaagaaacaaggagcatggcaactggatagaactgaagacggaaaatcaggaaaacggcagcttccacgccgcttcttctctcggcttatccgccatttacgatttcaaactcaacgataaattcgataaattcaaaccctatatcggtgtgcgcgtcgcctacggacacgttaaacatcaggttcattcggtggaaacagaaaccaagattattttcactacaccaacgggaggcgctaaagttggaggcaagatcccaaacaaaccgagtagcaaacctccctatcaccaaagccacagcatcagcagcttgggtcttggtgtcatcgctggtgtcggtttcgacatcacgcccaagctgaccttggacaccggataccgctaccacaactggggacgcttggaaaacacccgcttcaaaacccacgaagtctcattgggcatgcgctaccacttctga

SEQ ID NO: 72065 - DNA, 165 bp, Neisseria meningitidis; identical to SEQ ID NO: 54463

SEQ ID NO: 72066 - DNA, 849 bp, Neisseria meningitidis; identical to SEQ ID NO: 37501

SEQ ID NO: 72067 - DNA, 846 bp, Neisseria meningitidis; identical to SEQ ID NO: 54988

SEQ ID NO: 72068 - DNA, 1386 bp, Neisseria meningitidis
atgatggtaagagacaaccgcatccaaatgtttccgcacgaatggcgcgccagtacgacgctttccggcgtgtacgcgctgcgtatgctgggtatgttcctcgtgctgcccgtattggcggtgtatgccgcctcgctgcccggcgcggaaggcaacaaaacgctggtcgggctggcaatgggcatttacgggctgacacaggctctgctgcaactgcctttgggcatcgcttccgacaagttcgggcgcaagaaaaccatttatgtcgggctgattgtgtttgcagcgggcagcttccttgccgccgccgccgatacgctgcccatgctgatcgccgcacgcgccatacagggtgcgggagcggttagtgcggcggttaccgcgctgctggcggatttgacgcgcgacggcgtacgtacccgcgcaatggcgatgatcggtttgagtatcggtctgacgttttcggtcagcctcgtcgttgcccctgtgattgccgacgcggtgggcgtacgcggcttgtttctgctgaccggtattttgaccgttgccagtatcggcgtggtggcgtggatgactcccgacccggaggtttccaagctgcacgaagatacgcaggcgcagccttcgcgcataggcgaagttttgaaaaaccgtaggctgctgacgctcgatttcggcattttcgccctgcacgccgcgcaaatggcattgtttaccgcgctgcctttcgcgatgacccagctcggtttggaaaaaatacagcattggaaagtctatctgccctcgaccattacgggcttggtggtgatggttccgctgattatcgtcggcgagacgcgcaacaagctcaaacaggtttttgttttgggtatcgtctgtattgcggcggcgcagctcggtttgctgtccggtatgcgctcggtaggcttgattaccgcttatttggttgtttactttatcggttttaatgtgttggaagcgagcctgccgtctatggtttccaaaatcgcgccgtccgacctgaagggtacggcgatgggcgtgtacaacacgatgcagtcgctcggactgtttgccggcggcgcggcaggcggtttgctgtttcaaaaatacggcttttccggcgtgtttgccttttgcagtatattgatgctgctgtggctggtaattgccgttttatcgcctgcgcccaagcccgtcaaaaacctcagttaccctgtcggcggcgtgtggcagggcaatcaggaagggttataccgcgccttgtcggagcttgagggtgtggaagacatcggtttcagtttcgacgggcagaccgtctatctcaaagtgttgcagaagggtttcgatcaggctgccgctgaaaaaatcatcacaggagtttaa

SEQ ID NO: 72069 - DNA, 219 bp, Neisseria meningitidis; identical to SEQ ID NO: 36291

SEQ ID NO: 72070 - DNA, 852 bp, Neisseria meningitidis; identical to SEQ ID NO: 55288

SEQ ID NO: 72071 - DNA, 984 bp, Neisseria meningitidis; identical to SEQ ID NO: 65480

SEQ ID NO: 72072 - DNA, 279 bp, Neisseria meningitidis; identical to SEQ ID NO: 36930

SEQ ID NO: 72073 - DNA, 501 bp, Neisseria meningitidis; identical to SEQ ID NO: 41327

SEQ ID NO: 72074 - DNA, 258 bp, Neisseria meningitidis; identical to SEQ ID NO: 39854

SEQ ID NO: 72075 - DNA, 331 bp, Neisseria meningitidis
atgtttgatggcgaagtagaagcagatgaaagttattttggcggacaacgcaaaggcaaacgcggtcgcggtgctgccggtaaagtcgccgtattcggtcttttgaagcgaaatggtaaggtttatacggttacagtaccgaatactcaaaccgctactttatttcctattatccgtgaacaagtgaaacctgacagtattgtttatacggattgttatcgtagctatgatgtaattagatgtgagcgaatttagccattttagcttcgctgaaacttcgttttcgtatcaatcacagcacacattttgccgaacgacaaaaccatattaa

SEQ ID NO: 72076 - DNA, 534 bp, Neisseria meningitidis; identical to SEQ ID NO: 68670

SEQ ID NO: 72077 - DNA, 492 bp, Neisseria meningitidis; identical to SEQ ID NO: 54727

SEQ ID NO: 72078 - DNA, 285 bp, Neisseria meningitidis; identical to SEQ ID NO: 41095

SEQ ID NO: 72079 - DNA, 1029 bp, Neisseria meningitidis
atggaggcacgcccgccccgggtaaatgaagcccaagccccccgcgcggatgaaatgaaaaaagaaagccgccccgcgtttgacacggcagccgtaccggtatccgacagcgggtttgccgccaatgcaaatgtccgccgttttgtggacgatgaagtcgggaaaggggatttttcccgggcggaatggcaggatttttttgacaaagcggcttacaaggcggacatcgtcaagattatgcaccgaccctccacatcgcgtccgtggtatgtgttccgcacgggaaattcgggcaaggcgaaatttcgcggcgcgcgccggttttatgcggaaaaccgcgcagttgtcgatgatgtggcgcaaaaatacggcgtgcccgccgagcttatcgtggcgattatcgggattgaaacgaattacggcaaaaatacgggcagtttccgcgtggcggacgcattggcgactttaggtttcgattacccccgccgcgccgggtttttccaaaaagaattggtcgagcttttaaagctggcaaaagaagagggcggcgatgttttcgcctttaagggcagctatgcgggtgcaatgggtatgccgcaatttatgccttcgagctaccggaaatgggcggtggattatgacggggacggacatcgggacatatggggcaacgtcggcgatgtcgcggcatcggttgccaattatatgaagcagcacggttggcgcacgggcggtaaaatgctggtgtctgcaacattggcgccgggtgcggatgttcaggcaatcattggcgaaaaaaccgccctgacgcggacggtggcggatttgaaggcgtacggcatcatccccggcgaagagcttgcagatgatgaaaaggcggttttgttcaaactggaaaccgcaccgggcgtgtttgaatattatttgggcttgaacaatttttatacggtatggcagtacaaccacagccggatgtatgtaacggcggtcagggacattgccaattcgcttggcggcccgggattgtaa

SEQ ID NO: 72080 - DNA, 522 bp, Neisseria meningitidis
gtgaaagatagtttaatggacgcctttgatttttttatgcaaggcaattttaaaaaaattgcaactgaacaaggtttagaccgtaaatattttatattccactatatcgtatgtaatttatctgccatttcttctttttgtttaatgaaggttatccatagttatactatcctttgtttattaataatgataattggcattgcatttggatttatcttgagaaatagggttctatctatagtaaaaaataaacaaaattttttatctgatatgtttcccttggaaatgcctttcttttctagagtatacaaaatacctatcttggccagattcttgaataggggaatgaaatggctttatctccaaaattttttctgtttagttatgatttgtttctcgatatctcttatccttaatgaagaaagggggtggatgccttattttatctgctattggtttggactttgttatccagcaaacacttattacgtttttttatccagagattataaacatatctaa

SEQ ID NO: 72081 - DNA, 918 bp, Neisseria meningitidis; identical to SEQ ID NO: 36715

SEQ ID NO: 72082 - DNA, 4176 bp, Neisseria meningitidis; identical to SEQ ID NO: 68570

SEQ ID NO: 72083 - DNA, 297 bp, Neisseria meningitidis; identical to SEQ ID NO: 37913

SEQ ID NO: 72084 - DNA, 417 bp, Neisseria meningitidis; identical to SEQ ID NO: 39888

SEQ ID NO: 72085 - DNA, 2814 bp, Neisseria meningitidis
atgtccaacagacctacactcctcctcgttgacggctcgtcctacctctaccgcgcgtatcacgcgatggcgcagttgaccgcgcccgatggtgcgccgacgggcgcgatgtatggcgtgttgaacatgctgcgccggttgcgggcggattatgtgcatgattattgcgcggtggtgtttgatgcgaagggcaagaatttccgccacgagatgttccccgactacaaggcgacgcgcccgccaatgccggacgatttgcgtcctcaagcggaagccttgccggatttggtgcggttgataggctggccggtgctggtgattccgcaagtcgaagcggatgacgtgattggcacgctggcggcaatggcaggcgaagcaggttggaatgtggtggtgtccaccggcgataaggacatggcgcagttggtgaacgaacgcgtaacgctggtgaacacgatgagcggcgaaacgctggacattgaaggtgtgaaggcgaaattcggcgtgcgccccgaccaaatccgcgattatctcgcgctgatgggcgacaaggtggacaacgtgccgggcgtggaaaagtgcggcccgaaaacggcagtgaaatggctggaagcctacggctcgctggcgggcgtgatggaacacgcggcggaaatcaagggcaaagtgggcgagaatctgcgtgccgccctgcagcgcctgccgctgtcgtatgatttggtgacgattaaaaccgatgtggacttgcacaccgaactttcagacggcatcgaaagcctgcgccgtaccgcgccgaaatgggcgcaactggttgtcgatttcaaacgctggggcttccgcacctggctgaaagaagcggaaagtcgtatgcacgaagcggcggacggtgatttgttcggcagcgacagcatcggcgagcaggcggctttgaatgcggaggtgccgtctgaaaaacaacccgaacttgccccgacccccgaaaaactggattatcaagccgttaccaccgaagcgcagcttgccgccttgttggacaaactgtcgcaggcggacacaatcggcatcgatacggaaaccacgtcattagacgcgatgaacgcctcgttagtcggcatcagcatcgcgttccaagcaggcgaagcgatttacatccccgtaggacacagcctgaccgccgcacccgaacagcttgatttgcaagacgtgttaggccgtctgaaaccgcatttggaaaaccccgccctgaaaaaaatcgggcaaaacctcaaatatgaccaacatgttttcgccaattacggtatcgccctgaacggcatcgccggcgacgccatgctcgcttcctacatcattgagagccatctcggacacggcttggacgaattgtccgaacgctggctgggcttggaaaccattacctacgaatcgttgtgcggtaaaggcgcgaagcaaatcggttttgccgatgtcgccatcgggcaggcgaccgaatacgccgcccaagacgccgatttcgccctgcgcctcgaagcgcacctgcgcgcacaaatggacgccaaacagcttgaaatgtatgagaaaatggagctgcccgtcgcgcaggtattgtttgaaatggaacgcaacggcgtgcaaatcgaccgcgccgaactcgcccgccaaagcgcagaactcggcgccgagctgatgaagctcgaacaagaagcctatgccgccgcaggacagccgttcaacctcaactcgcccaaacagcttcaagaaatcctgttcgacaaaatgggcatcccgacaaaagggctgaaaaaaaccgccaagggcggcatttccaccaacgaggccgtgctcgaacagctcgcgcccgactaccccctgcccaaaatcatcctgcaaaaccgcagcctggcaaaactcaaatccacctacaccgacaaactgcccgaaatgatttcccccaaagacggccgcgtgcataccacctacgcccaagccgtcgccattacaggacgcttggcaagcaacaaccccaacctgcaaaacatccccatccgcaccgccgaaggccgacgcgtgcgccgcgccttcaccgcaccgcaaggcagcgtcatcgtttccgccgactattcccaaatcgagctgcgcatcatggcgcacctctccggcgacaaaaccctcattgccgcgttccaaaacggcgaagacgtacaccgccgcaccgccgccgaagtgttcggcatcgcccccgaaaacgtctcgtccgaacaacgccgctacgccaaaaccatcaacttcggcctgatttacggcatgggccaatacggccttgccaaatcattgggcatcgacaacatctccgctaaaaactttatcgaccgctacttcgcccgctaccccggcgtcgccgaatacatgcagcgcaccaaagaacaagccgccgcccaaggctttgtcgaaaccctgttcggcagaaggctctatttgcccgacatccgcaacaaaaacaccaacgcccgcgccggagccgaacgcgcagccatcaacgctcccatgcagggcaccgcgtccgacctcatcaaacgcgccatgatagacgtgtcccgctggctttcagagtgcgaagcctccccgtgggacgaactcttacaaagcaaactgattatgcaggtgcatgacgaactggtgctggaagtcgttgaaaccgaactggattttgtcaaagaaaaactgccgcagattatggcgaaagtggacggcggattattggatgtaccgctggtggctgaggttggcgtaggggagaattgggaagaggcacattga

SEQ ID NO: 72086 - DNA, 2376 bp, Neisseria meningitidis; identical to SEQ ID NO: 55654

SEQ ID NO: 72087 - DNA, 1410 bp, Neisseria meningitidis
atgatgaaaaatcgagttaccaacatccattttgtcggtatcggcggcgtcggcatgagcggcatcgccgaagtcttgcacaatttgggttttaaagtttccggttcggatcaggcgcgaaatgccgctaccgagcatttgggcagcctgggcattcaagtttatcccggccataccgcagaacacgttaacggtgcggatgtcgtcgttacctctaccgccgtcaaaaaagaaaatcccgaagttgtcgctgcgttggagcagcaaattcccgttattccgcgcgccctgatgttggcggagttgatgcgcttccgtgacggcatcgccattgccggcacgcacggcaaaaccacgaccaccagcctgaccgcctccatcctcggcgcggcaggacttgacccgactttcgttatcggcggcaaactcaacgccgcaggcaccaacgcccgcttgggcaaaggcgaatacatcgttgccgaagccgacgagtcggatgcatcctttctgcacctgacaccgattatgtccgtcgttaccaatatcgacgaagaccatatggatacctacgggcacagcgtcgaaaaactgcatcaggcgtttatcgatttcatccaccgtatgcccttctacggcaaagcctttttgtgtattgacagcgaacacgtccgcgcgattttgcccaaagtgagcaaaccttatgctacttacggtttggacgataccgccgacatctacgccaccgacatcgaaaacgtcggcgcgcaaatgaaattcaccgtccatgttcaaatgaaaggacatgagcaggggtcgtttgaagtcgtgctgaatatgcccggcagacacaacgtgctgaacgcattggcagccatcggcgtggcgctggaagtcggcgcatcggttgaagcgatccaaaaaggcttgctcggctttgaaggcgtcggccgccgcttccaaaaatacggcgacatcaagttgccaaacggcgggaccgcgctcttggtggacgactacggacaccaccccgtcgaaatggcggcgaccctttccgccgcacgcggcgcgtatccggaaaaacgtttggtactcgccttccagccgcaccgctatacccgcacgcgcgatttgtttgaagactttaccaaagtcctcaataccgttgacgcgctggtgctgaccgaagtttatgccgccggtgaagagccgattgccgccgccgattcccgcgctcttgcccgcgccatccgcgtgttgggcaaactcgagccgatttactgcgaaaacgttgccgatctgcccgaaatgctgttgaacgttttgcaggacggcgacatcgtgttgaatatgggcgcgggaagcatcaaccgcgtccccgccgcgctactggaattgtcgaaacagatttga

SEQ ID NO: 72088 - DNA, 582 bp, Neisseria meningitidis
atgaaaataagatggcggtacggaattgcgttcccattgatattggcggttgccttgggcggtctgtcggcatggttgggtcgtatcagcgaagtcgagattgaagaagtcaggctcaatcccgacgaaccgcaatacacaatggacggcttggacggcaggcggtttgacgaacagggatacttgaaagaacatttgagcgcgaagggcgcgaaacagtttccggaaagcagcgacatccattttgattcgccgcatctcgtgttcttccaagaaggcaggttgttgtacgaagtcggcagcgacgaagccgtttaccataccgaaaacaaacaggttctttttaaaaacaacgttgtgctgaccaaaaccgccgacggcaaacggcaggcgggtaaagttgaagccgaaaagctgcacgtcgataccgaatctcaatatgcccaaaccgatacgcctgtcagtttccaatatggtgcatcgcacggtcaggcgggcggcatgacttacgaccacaaaacaggcatgttgaacttctcatctaaagtgaaagccacgatttatgatacaaaagatatgtaa

SEQ ID NO: 72089 - DNA, 291 bp, Neisseria meningitidis; identical to SEQ ID NO: 54697

SEQ ID NO: 72090 - DNA, 201 bp, Neisseria meningitidis; identical to SEQ ID NO: 36765

SEQ ID NO: 72091 - DNA, 1842 bp, Neisseria meningitidis
atgcagacaaattatttgtctgaaacggattcgattatgaaaaaactgatttgcctgttcgccgtatttttgatgttgtgcggacgagctttcgcgctggatgcgaacgatctgctgccgccggaaaaggcattcgtgccggagcttgccgttgccgacgacggtgtgaacgtccgtttcaggattgccgacggatactatatgtatcaggcgaaaatcgtcggcaagaccaatccggcggatttgttgggacagccttctttcagcaagggcgaagagaaggaagacgagtttttcggcaggcagacggtttaccatcacgaagcgcaggttgcctttccttatgcaaaggctgtcggcgaaccgtataaattggttttgacctatcagggctgtgccgaagtcggcgtgtgctatccgcccgtggataccgagtttgatatttccggcaacggcacttaccatccgcaaaccgacgaaccggcatccgccaaagaccgctttttgcagccttcctctcaaaacggcagcggggcgctgccgcccccgaagggggatgagggcggcgacagccgtttcaagctgtcttgggatacgctcaacgccaatcttttggcgttttttctcgccggtttgggtctgagttttaccgcctgtatgtatcccctgttgccgattgtttccagtattgtggtcggcgacaaaaaggcgggcaaggcgcgggcgtttgtgctgtccgtcgtttatgttcagggtttggctctgacttatacgctggtcggcattgttgccggactgacgggcgcactgctgaccgtatggttgcagcaggcttgggtcgtgttggcggcatcggctttgatggtcgtcttggcactgtctatgttcgggctgttcaacatccagcttcccaacgccgtgcagtcgtattttcagaatcaaagcagcaggctttcaggcggtaaaatcgtttccgtctttattatgggcatattgtccgcgctgattgtcgggccgtgcgtcgccccgccgctggcatttgctttgggctacatcggtcagacgggcgatgcggttttaggcggtttggcactttacactttggcgttgggcaccggcgttccgctgattgccatcggcacgttcggcgggcatatcctgcctaaggcaggcgattggatgaatgccgtcaaatacgctttcggctttatcctgcttgccgtcgccgtttacctcgccacgccgcacttgccctattatctcgtcgtcgcgctgtacacgctgctgatgctggttcctgcctgtatgctgctggtcaacggacgcaggcagaaacgccgtccgaaagctgtggcattcgcattgggcagcatattgctgataggcggcgcgtggttcggctggcagggcgcaaacggcaaaacgaccgcgctgcaccatttcctgaccctcaatccgccggccgaagcaggcaaatcttcggaacacggcaaaatgtttgccgatactgccgcgctgaaggcagcgatggatacggcgttgaaagaacatcccgacaaacccgtcgttttggatttttatgccgactggtgcatttcctgcaaagaaatggcggcttacacgctcaatcagccggaagtgcatcaggcagtcgatatggaacgctttttccaaatcgacgtaaccgccaacacgcccgaacatcaggcgttgttgaaagaatacggtctgttcgggccgccgggcgtgtttgtcgtccgctccgacggcagccgcagcgagccgctgctgggttttgtcaaagcagacaagtttatcgagtggtatgaacaaaaccgctga

SEQ ID NO: 72092 - DNA, 1284 bp, Neisseria meningitidis
atgactgcatcgaaatcaggttttatcgggcaaatcttttcccgaaatatgcttgtctgtatttttacggggtttacctcggggctgccgctgtactttctgattaacctgattccggcgtggttgcgcagcgagcaggtggatttgaagagcatcgggctgatggcgttaatcggtctgccgtttacttggaaatttttgtggtcgccgctgatggacgcggtcaggctgcccgttttgggacggcggcgcgggtggatgctgctgacgcaggcagggttgctggcggctttggcggcctatgcctttttaaacccccgtaatcatctgccgctgattgccggcttgtcggtgcttgtcgcttttttttccgccagtcaggatattgtattggatgcgttcaggcgcgagattttgtcagacgaagaattgggtttgggcaactcggttcatgtgaacgcctaccggattgccgccctgattcccggttcattgagtttggtgttggcagacaggatgccgtggtcagaagtatttgttatcacttcattatttatgctgcccggccttctgatgacgctgtttcttgcgcgcgaacccgtgttgccgcctgccgttcctaaaacgttgaagcagaccgtggtagagccgtttaaagaattttttacgcgcaagggcatcgcttcggcggtgtgcgtgctgctgtttatcttcctttacaaactcggcgacagtatggcaaccgcgttggcaacgccgttttatctggatatgggtttcagcaagacagacatcggtttgattgcgaaaaatgcaggactgtggccggcagtggcggcaggtatcttgggcggcgtgtggatgctgaaaatcggcgtaaacaaagccttgtggctatttggcgcggtgcaggctgtaaccgttttggggtttgtatggctggcagggttcggacatttcgacacggtcggcacaggcgagaggctgatgctggcggcagttatcggcgcagaggcagtcggcgtgggtttggggacggcggcgttcgtatcgtatatggcgcgcgagaccaatcccgcatttaccgcaacgcagcttgcgctgtttaccagcctgtccgccgtcccgcgcacggtcatcaattcctttgccggttatctgattgaatggctcggttatgtaccgtttttccaactgtgtttcgcactcgccctaccgggtatgctgctgctgctgaaagttgcgccttggaacggggagaaaactcaggatgcaggcagatga

SEQ ID NO: 72093 - DNA, 285 bp, Neisseria meningitidis; identical to SEQ ID NO: 60069

SEQ ID NO: 72094 - DNA, 987 bp, Neisseria meningitidis; identical to SEQ ID NO: 55148

SEQ ID NO: 72095 - DNA, 1125 bp, Neisseria meningitidis
gtgtgcggattatgccataaaacggtgtccgacccaatcgcgggcgcgtccggagattggaaatcctgcttaaaaaatgtacaatggcgtacttttttgaaacgcggatccattatgcacatcggcggctattttatcgacaaccccatcgcacttgcgccgatggcgggcattaccgacaaaccgttccgccgactttgccgagattttggcgcaggttgggcggtgtgcgaaatgctgaccagcgacccgacgctcagaaatactagaaaaaccttgcaccgcagcgattttgtcgatgaaggcggcatcgttgccgtgcagattgccggcagcgatccgcagcagatggcggatgcggcgcgttacaacgtcagcctcggggcgcagcttatcgacatcaatatgggctgtcccgccaaaaaagtgtgcaacgtccaagccggcagcgcgctgatgcagaacgagccgctggttgccgccattttggaagccgtcgtccgtgcggcaggcgtacccgttaccctcaaaacccgtttgggctggcacgaagaccatcaaaacctgcccgtcatcgccaaaatcgccgaagattgcggcatcaccgcccttgccgtccacggacgcacgcgcacgcaaatgtacaaaggcgaggcgcgttacgaactcatcgccgaaaccaaatgccgtctgaacatcccggtctgggtcaacggcgacatcacttcgccgcaaaaagccgccgccgtcctcaaacaaaccgccgccgacggcatcatgatagggcgcggcgcgcaaggcagaccgtggttcttccgcgatttgaaacattacgccgaacacggtgttttaccgcctgccttgagtttggcagaatgcgccgccgctattttgaaccacatccgcgccatacacgcgttttacggcgatagtgcaggcgtacgcatcgcacgcaaacacataggttggtacatcggcgaaatgcccgacggcgaacaggcgcggcgtgaaatcaaccgcttggacagtgcggcggcgcaatacgacatgcttgcaggttatcttgaaagacttgccggaaaaaccgaccgttgggcgtgcggctaccgcacaaatgccttctga

SEQ ID NO: 72096 - DNA, 306 bp, Neisseria meningitidis; identical to SEQ ID NO: 36883

SEQ ID NO: 72097 - DNA, 366 bp, Neisseria meningitidis
atgattgccaaacacatcgaccgtttcccgctattgaagttggatcaagtgattgattggcagccgatcgagcagtacctgaaccgtcaaaaaacccgttacctccgagaccaccgcggtcgtcccgcctgtcccctgttgtccatgttcaaagccgtcctgctcggacaatggcacaacctctccgatcccgaactcgaacacagcctcatcacccgcatcgatttcaacctgttttgccgttttgacgaactgagcatccccgattacagtcatcaaccatattccggtttgtcggagaaagatgcatacgctgtgatgaccggataccgaccctttaaaagagtccgaccctatgccgtctga

SEQ ID NO: 72098 - DNA, 558 bp, Neisseria meningitidis
atgaaacccaaattcaaaaccgttttaaccgcgctgcttttggcggtttccctgccgtctatggcggcaacccatgttttgatggaaaccgatatgggcaatatccgtttggttttggacgaatccaaagcacccaaaaccgttgccaatttcgtgcgctatgcccgaaaaggcttttacgacaatacgatttttcaccgcgtcatcggcggcttcgttatccaaggcggcggattgaccgaggacttggcacaaaaggcaagcgataaggccgttgccaacgaatccggcaacggcttgaaaaacactgtcggcaccatcgccatggcgcggacggccgatccggattccgccaccagccaattctttatcaatctggcggacaatgattcactcaactacaaaaacggacaatacggctataccgttttcggcagggtcgaaagcggcatgaacaccgtttccaaaatcgcccgcgtcaaaaccgccacgcgcggcttttatcaaaacgtacccgtacagcccgtcaaaatccgtcgcgttgttgtcgggcagtaa

SEQ ID NO: 72099 - DNA, 501 bp, Neisseria meningitidis; identical to SEQ ID NO: 55877

SEQ ID NO: 72100 - DNA, 2280 bp, Neisseria meningitidis
atgaatacaccgactgatttgaaagtaaccaaacgagacggaagattagaagccattgatttggataagattcaccgtgtcgttacttgggcggcggaaggattggaaaatgtttccgtgtcgcaggtcgagttgaaatcgcacatccagttctacaacggcatccgcaccgacgacatccacgaaaccatcatcaaggccgctgccgatttaatttcggaagatactccggactaccaataccttgccgcgcgtttggcgattttccatctgcgtaaaatagcctacggcgaatacgagccgccgcacctttacgaccacgttaaaaagctcaccgatgccggaaaatacgacaggcatatccttgaggattacagccgcgaagaatttgatgaactgaacgcctatatcgaccacgaacgcgatatgtccttttcctatgccgctgtcaaacagctcgaaggcaaatatctggtacagaaccgcgttaccagccagatttatgaaacaccgcagttcttatatgttctggtggcgatgtgtcttttcagcaaatatcccaaagaaacacgcctcgattacgtcaaacggttttacgatgccgtttccacatttaaagtatcgctgccgaccccgattatgagcggcgtgcgtacgcctacgcgccagttctcaagctgcgtactgatcgaatgcgacgacagcctggattccatcaacgccaccaccagcgcgattgtgaaatacgtttcccagcgtgcgggcatcggcatcaatgccggacgtatccgcggtttggacagcgaaatccggggcggcgaagcgcggcataccggctgcattccgtttttcaaaatgtttcaggcggcggtcaaatcctgttcgcaaggcggcgtgcgcggcggagcggcaactttgttctaccccttgtggcatatcgaagccgaaagcctgctggtgttgaaaaacaaccgcggtgtggaagacaaccgtatccgtcagcttgattacggcgtgcaaatcaaccgcctgctgtacacccgcctgattaagggcggcaacattacgctgttttcgcccaacgaggttccggggttgtacgaagcgttttttgccgaccaagacgaatttgagcggctctatacgaaatacgagcaagacccgaacatacgcaagcgtatcattccggctgccgacctgttttccacgctgatgcaggagcgtgccgggaccgggcgcatctacattcaaaacgtcgatcactgcaatacgcacagcccgttcgatccgtgcgtcgcgcctgttcatcagtccaacttgtgtatggaaatcgccctgccgaccaaaccgctggacaatatcaacgatccgaacggcgaaatcgccctgtgtacactgtctgcctttaacttgggcgcattaaacagcttggacgaattggaagggcttgccgacttgaccgtgcgtgcgctcgatgcacttttagattatcagggatatccggtagaagccgcgcgtacctctactatgggtcgccgttcgctcggcatcggcgtgattaactatgcttattatctggcgaaaaacggtgtccgctacagcgacggctccgcgctcggtctgacccaccgtacctttgaagccatacagtattacctgctcaaagcatcggcaaaccttgccaaagaatacggtgcgtgcacgctctttaaccaaaccgtttattcgcaaggcaaactgcccatcgacacttacaaaaaagatttggatgccgtctgcggcgagcctttgcattacgactgggaaagcctgcgtgccgacatcgtcaaatacggcctgcgtaactccaccctgaccgcgctcatgccgtctgaaaccagttcgcaaatcgccaacgccaccaacggcatcgagccgccgcgcggattggtaacggtcaaagcatcgaaagacggcattttgaaacaagtcgtgccggagtttgaaaccctgaaaaatgcctatgaaaccctgtggcagcttcccggcaacgaaggctacctgaaacttgtcggcgtgatgcaaaaattcgtcgatcaatcgatttccgccaataccgcctacgacccgggcaaattcgaaggcggcaaagtttctatgaaacaaatgctcaaagacctgctgaccgcctacaaatacggcgtcaaaaccctgtactaccataacacccgcgacggtgcggacgatacgcagaccgatattcaggatgacggctgcgcgggcggggcttgtaagatttga

SEQ ID NO: 72101 - DNA, 342 bp, Neisseria meningitidis; identical to SEQ ID NO: 55024

SEQ ID NO: 72102 - DNA, 1155 bp, Neisseria meningitidis; identical to SEQ ID NO: 70148

SEQ ID NO: 72103 - DNA, 1347 bp, Neisseria meningitidis; identical to SEQ ID NO: 36871

SEQ ID NO: 72104 - DNA, 375 bp, Neisseria meningitidis; identical to SEQ ID NO: 64134

SEQ ID NO: 72105 - DNA, 492 bp, Neisseria meningitidis
ttgaaaaaccatccgcccgtcgccgcctttcccccgcaaggcgaaatggcgcatttcatgggtttggcattggaacaggcgaaactgtccgcattaatgggcgaaatacccgtcggggcagtcatcgtttcagacggcaaaatcatcgcatcggcacacaacacctgcattgccgactgcaatgtcagccggcacgccgaaatcaacgccttggcacaggcaggcagcgaaatgcaaaactaccgccttgacggatgcgacatctacatcaccctcgaaccctgcgccatgtgcgcgtccgcactgatacaggcacgaatcaggcgcgtgatctacggtgcggcagaacccaaaaccggcgcggcaggaagcatcgtcaacctgtttgccgacaaacgcctcaatacgcacaccgccatacggggcggaatcctgcaagaagaatgccgcgccgtattaagccgttttttccaaaacaaaagaaaaggttga

SEQ ID NO: 72106 - DNA, 882 bp, Neisseria meningitidis
atgtgtatcgagatgaaatttatattttttgtactgtatgttttgcagtttctgccgtttgcgctgctgcacaaacttgccgatctgacgggtttgcttgcctaccttttggtcaaaccccgccgccgtatcggcgaaatcaatttggcaaaatgctttcccgagtgggacggaaaaaagcgcgaaaccgtattgaagcagcatttcaaacatatggcgaaactaatgttggaatacggtttatattggtacgcgcccgccgggcgtttgaaatcgctggtgcgttaccgcaataagcattatttggacgacgcgctggcggcgggggaaaaagtcatcatcctgtatccgcactttaccgcgttcgagatggcggtgtacgcgcttaatcaggatgtcccgctgatcagtatgtattcccaccaaaaaaacaagatattggacgaacagattttgaaaggccgcaaccgttatcacaacgttttccttatcgggcgcaccgaagggctgcgcgctctagtcaaacagttccgcaaaagcagcgcgccgttcctgtatctgcccgatcaggatttcggacgcaacgattcggtttttgtggattttttcggtattcagacggcaacgattaccggcttgagccgcattgccgcgcttgcaaatgccaaagtgattcccgccatccccgtcagggaggcggacaatacggttacactgcatttctacccggcttggaaatcctttccgggtgaagacgcgcaggccgacgcgcagcgtatgaaccgctttatcgaagagcgggtgcgcgaacatccggaacaatatttttggctgcacaagcgttttaaaacccgtccggaaggcagccccgatttttactga

SEQ ID NO: 72107 - DNA, 285 bp, Neisseria meningitidis
atgccgtctgaagcccaaaaaccggtttcattcatactttattcgaatgattgaataaaagtaactgccaagaaaaacgtattttttggttatttcgccagtctaaatagagcaaccgggacgattgatatccgtgtgcatgacacagacagcaccaaagggaaaaacggcattttccaaagtatcggtatcaaaaccgccctttcactccaaaaataccaaatcgacaaaccgggcaaagaaatcagaccgtgccgcctgaaaaaacgcccacccgtccgttaa

SEQ ID NO: 72108 - DNA, 363 bp, Neisseria meningitidis; identical to SEQ ID NO: 37674

SEQ ID NO: 72109 - DNA, 453 bp, Neisseria meningitidis; identical to SEQ ID NO: 45863

SEQ ID NO: 72110 - DNA, 393 bp, Neisseria meningitidis; identical to SEQ ID NO: 37839

SEQ ID NO: 72111 - DNA, 126 bp, Neisseria meningitidis; identical to SEQ ID NO: 39360

SEQ ID NO: 72112 - DNA, 1545 bp, Neisseria meningitidis
atgaatatggtttccaaactggacaaatactggcagcaccccgccctctactggcctttgctcatcctttttgccgccgccaccccctttaccttcgcaccctactaccacttttggctgatgcccttgattttcggtgccttcgtccgcctcatcgaactgcgtccgcgttttgctgtctcttccgcctacctgttcggcctgaccgcatacacgacacagttctactggatacacaccgccctgcacgacgtttccggcctgcccgacctctatgccgtaccgctgaccttcctactccccgcctaccttgccctttatccggcactgtgtttctggctgtggaaaaaatttaccctgcctcggggcataaaaatcggtttggtactgcccatcctgtggacgctgaccgagtttgcccgcgagcgtttcctgaccggattcggctggggcgcaatcggctactcccaaatcaccccggacagcccgctcgccggctttgccccattgggcggcatccacatggttacactggcaaccgcctttctcggtgtctggctggttttggcgagtgataacaccgcacgttcgggcaaacgcctgcttccaattatcctgattgccgccctgcttgccgcaggctacaccgcccgacaaaccgacttcacccgccccgacggcagccgcagcaccgtcgccctgcttcaaggcaacatcgaccaaaccctcaaatggcgtgaagaccaagtcatcccgaccatacagaaatattacgaacaggtcggcaaaaccactgccgacatcgtcatcctgcccgaaaccgccatccccgttatgcgccaaaacctgccggaaaacatactggcaaaatttgccgaacaggcgcaaaacaacggcagcgcgctcgccgtcggcatcagccaatacacttcggacggcaacggttacgaaaacgccgtcatcaacctgaccggttatcaggaaaacaatcaggacggcatcccctactacgccaaaaaccacctcgtccccttcggcgaatacaaaccgctgcccttcctgaccacgccgctttacaaaatgatgaatatgcccctttccgacttccgcaaaggcggcggtaagcaatccgccctgctgatgaaaaaccaaaaaatcgccttcaacatctgttacgaagacggattcggcgacgaactgattgccgccgccaaagatgccaccctgcttgccaatgccagcaatatggcgtggtacggaaaatccaacgccatgtaccagcacctccaacaatcgcaggcacgggctatggaactcggacgctatatggtccgtgccaccaacaccggcgcaaccgccatcatctcccccaaaggcaacatcatcgcccaagcccaacccgatacggaaaccgtattggaaggacacatcaaaggctatgtcggcgaaacaccctatatgaaaaccggcagttcatggtggttgatgggcatattgaccctagccgcactgattcttttcatcttccgaaacaaagaacactga

SEQ ID NO: 72113 - DNA, 297 bp, Neisseria meningitidis; identical to SEQ ID NO: 69396

SEQ ID NO: 72114 - DNA, 396 bp, Neisseria meningitidis; identical to SEQ ID NO: 37459

SEQ ID NO: 72115 - DNA, 870 bp, Neisseria meningitidis; identical to SEQ ID NO: 69513

SEQ ID NO: 72116 - DNA, 1254 bp, Neisseria meningitidis; identical to SEQ ID NO: 54308

SEQ ID NO: 72117 - DNA, 906 bp, Neisseria meningitidis
gtggcacgggatttttacaaagaatacaaccccttatttatcaaaacataccaatccgaacaccccggcacatccgtcagcatccaacagtcccacggcggctccagcaaacaggcattatccgtagccaacggccttcaagccgatgtcgtaaccatgaaccaatcctccgacatcgacctgctcgaaaaaaaaggactggtagaaaaaggctggcaacaagccctccccgaccacgccgcgccctacaccagcactatggttttccttgtccgaaaaaacaaccccaaacagatccgcgattggaacgaccttgccaaagacggcgttaacatcgtcatcgccaatcccaaaacctcgggcaacggacactacgccttcctcggcgcatacggttacggtctgaaagccaccaacggcaacgaacaggaagcccaaaaactcgtcgcatccatcctcaaaaacacccccgtttttgaaaacggcggacgcgccgccaccaccaccttcacacaacgcaacatcggcgacgtactcattacttttgaaaacgaagccaactacgtcagcaaaaaactgacccaaggacagtttgaaatcgtctatccgagctacaccatttccgccgaaagccccgtcgccgtcgtcaacagcgtcgtcgcgaaaaaaggcacgcaaaaaaccgcccgcgcctatctcgaatacctttggagcgaaccggcgcaagaactcgccgcctcactctacctgcgcccccgcaaccccgaagtattggcaagacacaaagccgacttcccagacttagacaccttctctcccgaagaaaaattcggcggatgggacaacatcatgaaaacctacttcgctgacggcggcatattcgaccgcctgaccgcacaaaaatga

SEQ ID NO: 72118 - DNA, 696 bp, Neisseria meningitidis; identical to SEQ ID NO: 41477

SEQ ID NO: 72119 - DNA, 1149 bp, Neisseria meningitidis; identical to SEQ ID NO: 45955

SEQ ID NO: 72120 - DNA, 1110 bp, Neisseria meningitidis
atgttttcggacacagatatatccatgatggaaaacgccctccgacttgccgctttggggcgtttttccacttcgcccaatccgcgcgtcggctgcgttatcgcacacggcagccaaattgtcgggcagggcttccacgtcaaagcgggcgaaccccatgccgaagtccacgccctgcgtcaggcgggcgaaatggcacaaggcgcgaccgcctttgttaccctcgaaccgtgcagccattacggacgcacaccgccctgcgccgaagctctgctccgttccggcgtaacacgcgtcgtcgccgccatgcgcgaccccaacccgctggttgcaggcaaagggcttgccctgctcgaatcggcaggcatcaagacggaatgcggtttactcgaacatcaggcaagggaactcaaccgaggcttcctgtcgcgcatcgaacgccgccgccccttcgtccgcctcaaatgcgccgtttcgctggacggcaaaaccgccctttcagacggcagcagcttttggattaccggcgaagacgcgcgtgccgacgtacaggttttgcgtgccgaaagctgcgcggtgctgaccggcatcggcacggtgttggcggacaatccccggctcaacgtccgcgcttttccaactttgcgccaacccgcacgcatcgttttagacagccgcctgcgcctgcccttggacagccaccttctgaccgacggacaatctccaacctacatcgccacactcgaacgcaacgaagacagactgcacccctatcgggaacacgcacacatccgcatcctgatgccgtctgaaacggcaggcggcaaaatcgacctgaaccacctgatgcgcctccttgccgacgaaggtttcggagaaatcatggtcgaagcaggctccgaactcacatccgcatttctggcagaagatctggcggacgaaatcgtgctgtaccgttcgcccaaaatcctcggcagcggcaaagacctgctttccctgcccgaaaaccgcgccgccctttccgcaccgcccttgtggacacccgtttcaagcgaaatcctcggacacgacatcaaaaccgtgttccggaaaaacgataacgccttttaa

SEQ ID NO: 72121 - DNA, 1443 bp, Neisseria meningitidis
atgaaacaattggccatgtacatcaacggacgctttgaaaacgacttcaacggcgaatggcgcgacgtattgaacccgtccaccgaagaaaccatcgcccgcgaacccaaaggcggcaaagcggacgttgaccgagccgtggcggcggcacgcgcggcgcaaccggcttgggaacgtctgcctgcggtcgaacgcggcgcgtatttgcgcaaaatcgcccaaggcatacgcgaacgtgccgacgagctgaccgacaccatcgttgccgaaggtggcaaaaccaaagacttggcacgcgtggaagtcatgtttaccgccgactatctcgattaccaggccgaatgggcgcgccgttacgaaggcgaaatcatccaaagcgaccgcccgcgcgaaaacattttattgttcaaacgtccgctgggcgtaattgccggcattttgccgtggaacttccctttcttcctgattgcccgcaaaatgggtcccgccttagtaacgggcaacaccatcgttgtcaaacccagcagcgtaaccccgatcaactgccacatcttcgccgaaatcgtcgatgcggtcggattgcccgcaggcgtgttcaacgtggtgaacggtccgggtgcggaaatcggcaatgccttgtctgcccatccgcaagtcgatatggtcagcctgaccggctccgtcgaagcaggccgccaagtgatggaagccgcttccgccaacatcaccaaagtttcgctggaactcggcggcaaagcccccgccatcgttttgaaagacgcggatttggatttggcggtgaaatccatcttggcttcgcgcgtcggcaacaccggtcaaatctgcaactgcgccgagcgcgtctatgtccacagcagcctgaaagacgcgttcattgaaaaaatgaccgccgccatgaaaggcgtgcgctacggcaaccctgccgaagccgaagcaggcgcgctggaaatgggtccgctgattgaagagcgcgccgtcaaagccgttgccgaaaaagtggaacgggcagtcaaacaaggtgcgaaactggtctgcggcggcaaacgcgccgaagggcgcggctatttcttcgagccgaccctgctgaccgacaccgacaacagtatggacattatgaaagaagaaaccttcggccccgtgctgcccgtttccgctttcgacacgctcgaccaagtcatcgcactggctaacgattgcgagtttggtctgaccagttctgtttatacgactaatttaaacgaagccttctacgttacccgccgcctgcaattcggcgaaacctacatcaaccgcgaaaacttcgaagccatgcagggtttccacgcgggctggaaaaaatccggcatcggcggcgcggacggcaaacacggtttggaagaatatctgcaaacccaagtcgtttatctggaaaccgacatttaa

SEQ ID NO: 72122 - DNA, 1722 bp, Neisseria meningitidis; identical to SEQ ID NO: 55090

SEQ ID NO: 72123 - DNA, 756 bp, Neisseria meningitidis; identical to SEQ ID NO: 55604

SEQ ID NO: 72124 - DNA, 1470 bp, Neisseria meningitidis; identical to SEQ ID NO: 55345

SEQ ID NO: 72125 - DNA, 1083 bp, Neisseria meningitidis; identical to SEQ ID NO: 55800

SEQ ID NO: 72126 - DNA, 453 bp, Neisseria meningitidis; identical to SEQ ID NO: 43802

SEQ ID NO: 72127 - DNA, 1296 bp, Neisseria meningitidis
gtgattgccatgatttacatcgtactgtttctagctgtcgtcctcgccgttgtcgcctacaatatgtatcaggaaaaccaataccgcaaaaaagtgcgcgaccagttcgggcactccgacaaagatgccctgctcaacagcaaaaccagccatgtccgcgacggcaaaccgtccggcgggtcagtcatgatgccgaaaccccaaccggcggtcaaaaaaacggcaaaaccccaagaccccgccatgcgcaacctgcaagaacaggatgccgtctacatcgccaagcagaaacaggcaaaagcctccccgttcaaaaccgaaatcgaaaccgccttggaagaaagcggcattatcggcaactccgcccacaccgtttccgaaccccaaaccggacattccgcaccgaaacctgccgacgcgccggcaaaacctgcacccgttccgcaaacacctgcaaaaccgctgattacgctcaaagaactgtcaaaagtcgaattaccctggtttgacgtgcgcttcgacttcatctcctatatcgcgctgaccgaagccaaagaactgcacgcactgccgcgcctttccaaccgctgccgctaccagattgtcggctgcaccatggacgaccatttccagattgccgaacccatcccgggcatccgctatcaggcatttatcgtgggtattcaggcagtcagccgcaacggacttgcctcgcaggaagaactctccgcattcaaccgccaggtggacgcattcgcacaaagcatgggcggtcagacgctgcacaccgaccttgccgcctttatcgaagtggcttccgcactggacgcattctgcgcgcgcgtcgaccagaccatcgccatccatttggtttccccgaccagcatcagcggcgtagaactgcgttccgccgtaacgggcgtgggtttcgtcctggaagacgacggcgcgttccactataccgacacgtcgggctcgaccatgttctccatctgctcgctcaacaacgagccgtttaccaatgcccttttggacaaccaatcctataaaggcttcagtatgctgctcgatattccgcactctccggcaggcgaaaaaaccttcgacgatttgtttatggatttggcggtacgcctgtccggccagttgaacctgaatctggtcaacgacaaaatggaagaagtttcaacccaatggctcaaagacgtacgcacttatgtattggctcgtcagtccgagatgctcaaagtcggtatcgaaccgggcggcaaaaccgcattgcgcctgttctcctaa

SEQ ID NO: 72128 - DNA, 492 bp, Neisseria meningitidis
atgcgtgcggtcatacagaaaacggtaggtgcaaaggtggatgtcgtgtccgaaaacggcacggaaacctgcggcaaaatcgacggcggattcgtcgtactgctcggtgtaacgcatagcgacatagaaaaagatgcacgctatgtcgccgacaaaatcgcccatttgcgcgtgtttgaagacggtgagggcaagttgaacctgtctttgaaggatgtcgggggatccgtgctgctggtgtcgcagtttacgctttatgccgatgcggcaagcggccggcggccgtcattttcgaaagccgcacctgcagaacaggcaaaacggctttatctgcatacggcagaactgttgcgcgggcacgggattcatgtcgaaacagggcgtttccgcacgcatatgcaggtgtcgctctgtaacgacgggccggtaaccatactgctggactctttcatgacgcggatttccccaaaaatgaaggttgttccggattga

SEQ ID NO: 72129 - DNA, 1089 bp, Neisseria meningitidis; identical to SEQ ID NO: 57096

SEQ ID NO: 72130 - DNA, 1366 bp, Neisseria meningitidis
atgcagcatctgactgaaagaatgacgcaaattgccaagctgctgaattcttccgcaaacaatcctgatatagacattcccgattttcttactgaaatcaaagattattcagaattttccgtgacagatgaaaatggaacctacctgcattgggacaaattccgccagattcacacggaagatacgcggatgaaatggcgcgccgttaaggaaagccgcaaaaaaatccaaaaaccaattgatttcccgtttgaacatcagttttggttctgcattcccgactctttgcaggcacggcttcatttgattgacaaaagctgcggcagttctatcggcacgtctagcttgggtggcttcggcagaagcgagcaaaacagattcttgctcaagtctctgattatggaagaagcgattacatccgcccaactggaaggtgcggctaccacgcgtaaagtggccaaggatatgctcaaatcgcagcgtaaacccaaaacaaaagacgaaatcatgatagtgaacaactatcacttgatgaaaaaagcggtagaattgaaaaatacgccgttaagtgttgaaatgattttggatttgcaccgcattgctaccagcaacgctattgaaaacaaggccgaccccgggcaattcaggcgggacgacgaaatctttatcgccgataacgacggcaacagcctgtaccaaccaccgccacacgggcaggttcatacgctgatggaagcggtatgcacgtttgccaacaacacttatgacggcgtggaaaatccgtttatccatccggttgtccaagctatcatcctgcatttcctgattggctacatccatccgttcggagatggcaacgggcggatagcgcgggctttgttctattggtttatgctcaaaaacagctactggctgtttgaatacatatcaatcagccgtcttctgaaaaacgctccggcccaatacgccaaatcctatttgtatgcggaaactgacgattcagatttaacctatttcatctattaccaatgcgatattatcaagcgggcggttgccgatttggagcactacatttccgacaaacaaaaacaccaacaggaattcaaagcagcgattgcccaatatactgaaaagataggaaagttgaaccaacggcaaattggtatcctgcaaaaagcagtggaagaaagcggaaaaatctttactgcactagaaattgccaaccaatacggcatctccctgaatactgcccgtagcgatttgagcaaactgggagaatatagattcctagtaccgttcaaatcaggaaatgctttagagtatgttgctcctcaggatttattggaaaggttagaaaaaaaaatag

SEQ ID NO: 72131 - DNA, 727 bp, Neisseria meningitidis; identical to SEQ ID NO: 69688

SEQ ID NO: 72132 - DNA, 499 bp, Neisseria meningitidis
atgagaaaaagtcgtctaagccggtataaacaaaataaactcattgagctatttgtcgcaggtgtaactgcaagaacggcagcagagttagtaggcgttaataaaaataccgcagcctattattttcatcggttacgattacttatttatcaaaacagtccgcatttggaaatgtttgatggcgaagtagaagcagatgaaagttattttggcggacaacgcaaaggcaaacgcggtcgcggtgctgccggtaaagtcgccgtattcggtcttttgaagcgaaatggtaaggtttatacggttacagtaccgaattcaaaccgctactttatttcctattatccgtgaacaagtgaaacctgacagcattgtttatacggattgttatcgtagctatgatgtattagatgtgcgcgaatttagccattttagcttcgctgaaacttcgttttcgtatcaatcacagcacacattttgctgaacgacaaaaccatattaa

SEQ ID NO: 72133 - DNA, 1047 bp, Neisseria meningitidis
atgaaaatgcaggcagttgttgtgaataaaaatgtagcgggcgatgtggaaatagtcgaacgcgaggttcgcccgttggaatacggcgaggcgttggtcgaagtcgaatattgcggcgtgtgccacaccgacctgcacgttgcggcaggcgactacggcgaaaaaccgggccgcgtgctgggacacgagggcatcggtttggttaaagaagttgccgacggtgtgaaaaatctgaaagtcggcgaccgcgtcagcatcgcctggctgttccaaagctgcggctcttgcgaatactgcaataccggccgcgaaaccctgtgccgctctgtattgaacgcgggctacaccgccgacggcggtatggcgacccactgcatcgtcaatgcggattatgcggtcaaagtccccgacggtctcgaccccgcccaagcgtccagcatcacttgtgccggcgtgaccacttataaagccattaaagtttccggcgttcgtccgggccaatggattgcgatttacggcgcaggcggtttgggcaacttggcggttcaatacgcgaaaaaagtatttggcgcacacgtcgtcgccatcgacatcaacgatgaaaaactggcttttgccaaagaaagcggcgcagatttagtcatcaacgctgccaaagaagatgccgccaaagtgattcaggaaaaaaccggcggtgcacacgtagccattgttaccgccgtatccgccgccgcattcaactctgccgtgaattgcgtccgcgcgggcggacgtgtggttgccatcggactgccgccggaatcgatggatttgtccatcccgcgtttggttttggacggcatcgaagtggtcggctctttggtcggcacgcgcaaagatttggaagaagccttccaattcggcgcggaaggtttggttgtgccgaaagtccaactgcgtgctttggatgaagcacccgccattttccaagaaatgcgcgaaggcaaaatcaccggccgtatggtgatcgatatgaaaaaagaatgcggctgcggtcatcaccactga

SEQ ID NO: 72134 - DNA, 654 bp, Neisseria meningitidis; identical to SEQ ID NO: 70129

SEQ ID NO: 72135 - DNA, 328 bp, Neisseria meningitidis
atgtttgacggcaaagtagaagcagatgaaagttattttggcggacaacgcaaaggcaaacgcggtcgcggtgctgccggtaaagtcgccgtattcggtcttttgaagcgaaatggtaaggtttatacggttacagtaccgaattcaaaccgctactttatttcctattatccgtgaacaagtgaaacctgacagcattgtttatacggattgttatcgtagctatgatgtattagatgtgcgcgaatttagccattttagcttcgctgaaacttcgttttcgtatcaatcacagcacacattttgctgaacgacaaaaccatattaa

SEQ ID NO: 72136 - DNA, 1035 bp, Neisseria meningitidis; identical to SEQ ID NO: 69672

SEQ ID NO: 72137 - DNA, 1776 bp, Neisseria meningitidis; identical to SEQ ID NO: 55048

SEQ ID NO: 72138 - DNA, 549 bp, Neisseria meningitidis; identical to SEQ ID NO: 54676

SEQ ID NO: 72139 - DNA, 948 bp, Neisseria meningitidis; identical to SEQ ID NO: 55151

SEQ ID NO: 72140 - DNA, 714 bp, Neisseria meningitidis; identical to SEQ ID NO: 41313

SEQ ID NO: 72141 - DNA, 666 bp, Neisseria meningitidis; identical to SEQ ID NO: 56066

SEQ ID NO: 72142 - DNA, 369 bp, Neisseria meningitidis; identical to SEQ ID NO: 39932

SEQ ID NO: 72143 - DNA, 411 bp, Neisseria meningitidis; identical to SEQ ID NO: 55930

SEQ ID NO: 72144 - DNA, 549 bp, Neisseria meningitidis; identical to SEQ ID NO: 54418

SEQ ID NO: 72145 - DNA, 546 bp, Neisseria meningitidis
atgaaacactatgccttactcatcagctttctggctctctccgcgtgttcccaaggttctgaggacctaaacgaatggatggcacaaacgcgacgcgaagccaaagcagaaatcatacctttccaagcacctaccctgccggttgcgccggtatacagcccgccgcagcttacagggccgaacgcattcgacttccgccgcatggaaaccgacaaaaaaggggaaaatgcccccgacaccaagcgtattaaagaaacgctggaaaaattcagtttggaaaatatgcgttatgtcggcattttgaagtccggacagaaagtctccggcttcatcgaggctgaaggttatgtctacactgtcggtgtcggcaactatttgggacaaaactacggtagaatcgaaagcattaccgacgacagcatcgtcctgaacgagctaatagaagacagcacgggcaactgggtttcccgtaaagcagaactgctgttgaattcttccgacaaaaacaccgaacaagcggcagcacctgccacagaacaaaattaa

SEQ ID NO: 72146 - DNA, 207 bp, Neisseria meningitidis; identical to SEQ ID NO: 41992

SEQ ID NO: 72147 - DNA, 372 bp, Neisseria meningitidis; identical to SEQ ID NO: 36794

SEQ ID NO: 72148 - DNA, 354 bp, Neisseria meningitidis; identical to SEQ ID NO: 55797

SEQ ID NO: 72149 - DNA, 402 bp, Neisseria meningitidis; identical to SEQ ID NO: 55449

SEQ ID NO: 72150 - DNA, 924 bp, Neisseria meningitidis; identical to SEQ ID NO: 41740

SEQ ID NO: 72151 - DNA, 1551 bp, Neisseria meningitidis
atgaaaaaacctttgatttcggttgcggcagcattgctcggcgttgctttgggcacgccttattatttgggtgtcaaagccgaagaaagcttgacgcagcagcaaaaaatattgcaggaagcgggcttcttgaccgtcgaatcgcaccaatatgagcgcggctggtttacctctacggaaacgacggtcatccgcttgaaaccggagttgctgaataatgcccggaaatacctgccggacaacctgaaaacagtgttggaacagccggttacgctggtaaaccatatcacgcacggccctttcgccggcggattcggcacgcaggcgtacattgaaaccgagttcaaatacgcgcctgaaacggaaaaagttctagaacgcttttttggaaaacaagtcccggtttcccttgccaataccgtttattttaacggcagcggtaaaatggaagtcagtgttcccgccttcgattatgaagagctgtcgggcatcaggctgcactgggaaggattgacgggaaaaacggtttatcaaaaaggtttcaaaagctaccgcaacagctatgatgcgcccttgttcaaaatcaagctggcagacaaaggcgatgccgcgtttgaaaaagcgcatttcgattcggaaacttcagacggcatcaatccgcttgctttgggcagcagcaatctgaccttggaaaaattctccctagaatggaaagagggtgtcgattacaacgtcaagttaaacgaactggtcaatcttgttaccgatttgcagattggcgcgtttatcaatcccaacggcagcatcgcaccttccaaaatcgaagtcggcaaactggctttttcaaccaagaccggggaatcaggctcatttatcaacagtgaagggcagttccgttttgacacgctggtgtacggcaatgaaaaatacggcccgctggacatccatatcgccgccgaacatctcgatgcttctgccttaaccgtattgaaacgtaagtttgcacaaatttccgccaaaaaaatgaccgaggaacaaatccgcaatgatttgattgccgccgtcaaaggcgaggcttccggactgttcaccaacaatcccgtattggacattaaaacttttcgtttcacacagccgtcgggaaaaatcgatgtgggtggaaaaatcatgtttaaagacatgaagaaggaagatttgaaccaattgggtttgatgctgaagaaaaccgaagccgacatcagaatgagtattccccaaaaaatgctggaagacttggcggtcagtcaggcaggcaatattttcagcgtcaatgccgaagatgaggcggaaggcagggcaagtcttgacgacatcaacgagaccttgcgcctgatggtggacagtacggttcagagtatggcaagggaaaaatatctgactttgaacggcgaccagattgatactgccatttctctgaaaaacaatcagttgaaattgaacggtaaaacgttgcaaaacgaaccggagccggattttgatgaaggcggtatggtttcagagccgcagcagtaa

SEQ ID NO: 72152 - DNA, 912 bp, Neisseria meningitidis; identical to SEQ ID NO: 44117

SEQ ID NO: 72153 - DNA, 390 bp, Neisseria meningitidis; identical to SEQ ID NO: 45846

SEQ ID NO: 72154 - DNA, 510 bp, Neisseria meningitidis; identical to SEQ ID NO: 54265

SEQ ID NO: 72155 - DNA, 2133 bp, Neisseria meningitidis; identical to SEQ ID NO: 69126

SEQ ID NO: 72156 - DNA, 879 bp, Neisseria meningitidis; identical to SEQ ID NO: 46918

SEQ ID NO: 72157 - DNA, 396 bp, Neisseria meningitidis; identical to SEQ ID NO: 54211

SEQ ID NO: 72158 - DNA, 1311 bp, Neisseria meningitidis; identical to SEQ ID NO: 39855

SEQ ID NO: 72159 - DNA, 1437 bp, Neisseria meningitidis
ttggaaaactcattaattatcggtttggcactggcggtattgctgatgcttttggttatgcgtgcgaagcagggtaagaaaacaccgaagcgcaaatcccaaggtgtcggcaatacgcaggggcagacacccggaagcaatgattcggactgggtcgatcagattggacaatcggtttcagacggcacgcaacccgactggtcttggaacgaaagtgccgagaccgcatccgccgccgtatccgcgcaagaagtcgatccgcttacggagtatcaggtttataagcaattcggttatcagggcaaggctgccgaatctttggctgcctatctggacggcattccggatggtgaagcgaaacctgaaaaccttatccgcgagctgctcgatatcaatctcgaagtgggggatgtcgatgttttggcagacaatctgcaaaaatacggcaaactgattccttccgaacttttggcaaaatatatcgaacaggcattacagcgcgattcaaaccatttgcgtatccgcgtcttggcggaagaaggtttgggatggggtactcaggagattgaaaaacgtgcggaaggcggttctgcgacggcagcttccgcatcgcccccgccggatgccggcggtaaggcttatgaagccgaagaaatcaagcgcatcccgattgtgcggggcaaaaaagacgtgtccggaatcagtcaagaggaaatcggtgcgattgccggtttggtccgtgccgatcaaggtgcgaaaatccttaaagacaaagtcagctatgaaacggcatcgaaacaatacgaccgtgccatccaaacttccgaaaaacctgcaaacctgattatcgatgcgttgaaactcgattaccaacacgcggacatagaccgttttgccggacatttgtggaaactttaccaaacgttgggcaactacggcaggcaggttaaagagcggatgctggggtgggggtacagcttgggttaccatgaagttttcgatgatttggaaaaagggccgaacgaccggcaaatcaaagacatcggtatggggcacgggtatctgccgaaaaatatacagaaattcaaatcgcaacatcgggatttggtgcttcaagattcttcgttgattaacaccggttcgtctccggcagacgatgcggttaaagaagtagagtcgttgctgatgtatggtcagattgaagcggcaatggatgtgttggagcaggcggtattgaaatatcccgacgagtcccagctttatattacgttgatcgatatttatgaacgtactgaagattgggataggttggggcagtttttaagggtattgagggaacgtgcggacaggcttcctgaagaggtcgttatgctgatgagccggctgctgcagcgtatgaatcaaaatattaaaaaaataaaacggtacggaaaataa

SEQ ID NO: 72160 - DNA, 843 bp, Neisseria meningitidis; identical to SEQ ID NO: 68553

SEQ ID NO: 72161 - DNA, 345 bp, Neisseria meningitidis; identical to SEQ ID NO: 62097

SEQ ID NO: 72162 - DNA, 564 bp, Neisseria meningitidis; identical to SEQ ID NO: 69350

SEQ ID NO: 72163 - DNA, 2187 bp, Neisseria meningitidis
ttgccccgatgcctgaaacagactgtccgccacgtcatgccgtctgaaaccggcgcagatgccgccaagctttcagacggcattgcctgcccgctccgaccgaacaacaaccatctttgggagaaccttatgcccgaacaaaaccgcatcctctgccgcgaactgagcctgctggcattcaaccgccgcgtgttggcacaggcggaagacagaaacgtcccccttttggaacgcctgcgctttctgtgcatcgtgtcgtccaatcttgacgagttttttgaagtccgcatggcgtggctcaagcgtgaaaacaagctgcacccccggcgcaggctggacaacggcaaaatgccgtctgaaaccatcgccgacgttaccgaagcggcgcgctccctgatacggcaccagtacgacctgttcaacaacgtccttcagcccgagctggcacaagaaggcatccatttttaccgccgccgcaactggacgggcgcgcagaaaaagtggatcgaaagctatttcgaccgcgaattgctgccgattctgacccccatcggactcgacccgtcccaccccttcccgcgaccgctgaacaaatcgctcaacttcgccgtcgaactcgacggcacggacgcattcggcagaccttcggggatggcgattgtgcaggcaccgcgcatcctgccgcgcgtcgttcccctgccgtccgaactgtgtggcggcggacacggcttcgtcttcctgtcgtccatcctccacgcccacgtcggcaaactcttcccgggcatgaacgtcaaaggctgccaccagttccgcctgacgcgcgacagcgacttgaccgttgacgaagaagacctgcaaaacctccgcgccgccatccaaaacgaactgcacgaccgcgaatacggcgacggcgtgcggctcgaagtcgccgacacctgtcccgcctacatccgcgactttctgctcgcgcaattcaaactgaccgccgccgaactctatcaggtcaaaggcccggtcaacctcgtgcgcctcaacgccgtccccgacctagtcaaccgccccgatttgaaatttcccacacacacgccgggcagactgaaagccttgggcaaaaccgcgtccatattcgatttggtgcgccaatcgcccatcctgctgcaccacccctaccaatcgttcgaccccgttgtcgaaatgatgcgcgaagctgccgccgaccccgacgtgcttgccgtcaaaatgacgatttaccgcaccggcacgcgctccgaactcgtccgcgccctgatgaaggcggcactcgccggcaaacaagtaaccgtcgtcgtcgaactgatggcgcgttttgacgaagccaacaacgtcaactgggcgaagcagctcgaagaggcgggcgcgcacgtcgtatacggcgtgttcggctacaaagtacacgccaaaatggcactcatcatccgccgcgaagacggcgtactcaagcgttacgcccacctcggcacgggtaactaccaccaaggcacatcgcgcatctacaccgacttcggcatcattaccgccgacgaacaaatcaccgccgatgtgaacacattgtttatggaaatcacaggcttgggcaaacccgggcggctgaacaaactctaccaaagcccgtttaccctgcacaaaatggttatcgaccgcatcgcacgcgaaaccgaacacgcaaaagccggcaaaccggcgcggattaccgccaagatgaattcgctcatcgaaccgaccgtcatcgaagccctgtatcgggcaagcgcggcaggcgtacaaatcgatttgattgtgcgcggtatgtgcaccttgcgcccgggtgtaaaaggcttgtccgaaaacatccgcgtccgctccatcatcggcaggcagctcgaacacgcgcgcgtgtattgcttccacaacaacggcgcggacgatacctttatctccagcgcggattggatggggcgcaacttcttccgccgcatcgaaaccgccgcgccgattgccgcgcccgaactcaaaaaacgcgtcatccgcgaaggtttggaaatggcactggacgacaacacccacgcatggctgatgcagcccgacggcggctatatccgcgccgcgcccgccgagggcgaaagcgaagccgatctgcaaaacgatttgtggacactgctcggaggctga

SEQ ID NO: 72164 - DNA, 621 bp, Neisseria meningitidis; identical to SEQ ID NO: 37371

SEQ ID NO: 72165 - DNA, 318 bp, Neisseria meningitidis
atggtagtacgcggcggaatctatctggtctccttagacccgaccgtaggaagcgaaatcaaaaagacacgtccttgtgtcgtagtctctcctcctgaaatacacaactatctcaagactgtgctgatcattcccatgacgagcggaagccgtcctgccccgttccgcgtcaatgtccgctttcaggataaagacggtttgcttttacccgaacaaattagggctgtggataaagccggattggtcaaacatcttggaaatttagacaacagtacggctgaaaaactgtttgcagtattgcaggagatgtttgcctga

SEQ ID NO: 72166 - DNA, 651 bp, Neisseria meningitidis; identical to SEQ ID NO: 60076

SEQ ID NO: 72167 - DNA, 606 bp, Neisseria meningitidis
atgacaataatgaatatcaatacttccgaaaataaagatgctgttgccgaacacaccggacaatggttggaaaaagccgtcatcggtctgaacctgtgtccctttgccaaagccccccacgttaaaaaccttgtccgcatcgcaatcagcgaagccaaacaccttgacagttttttggaagacttggacgaagaactgcagcgactgggcaatacacccgccaccgaactggaaaccaccctgctggttcacccgaccctattccccgatttcgacgtattcaacgatatgctcgacattgccgatgccgccgttatcgaaaacggcttggaaggcatcgtccaaatcgcaccgttccatccccaattccgctttcagaataccgaacccgacgacatcggcaactacaccaaccgttctccctatccgacgctgcacctcatccgcgaagacagcattgccaaagccgcacaagcctttcccgacgcttcggcaatattcgaacgcaatatcgccctgctggaaaaaatgggacatgaaggctgggcaaaactcggtatcacatcctgcccttatccgcacaataagaaaaatatttcaaaatga

SEQ ID NO: 72168 - DNA, 435 bp, Neisseria meningitidis; identical to SEQ ID NO: 36184

SEQ ID NO: 72169 - DNA, 300 bp, Neisseria meningitidis
atgcattatttcagtattcatgaccaatcgggacggcatataggctttttcatcctgcttgccgacgacgaatcggaagcacggccgcaaagcgggcgttttgccgtcaaacttgaaggcggaatggaaaatcatgtcctgtcgccgttcggtcagacggaaatcctccaatattggcgcgtggtcaaagaccgtatcgagctgttttttgacgaagctcccgtcggaactttgcgtaacgaatatctgaccgtgtcggggcagacttttgttttgaacgatttgacagggaatatgtga

SEQ ID NO: 72170 - DNA, 543 bp, Neisseria meningitidis; identical to SEQ ID NO: 45832

SEQ ID NO: 72171 - DNA, 1077 bp, Neisseria meningitidis
atgcaagaatggttccaaaacctctttgccgcaacgctcggtctgggcgatttgggcatcaccgtaggcttggtggtatccgtcatcgtcaaaatcgtgattatcctgattccgctgattctgaccgttgcctacctgacgtatttcgaacgtaaagtcatcggcttcatgcagcttcgcgtcggtccgaacgtaaccggcccgtggggtctgattcagccgtttgccgacgtgttcaaactcttgtttaaagaggtaacccgtccgaagctgtcaaacaaagccctgttctacatcggcccgattatgtcgcttgctccgtctttcgcagcatgggcagtgattccgttcaacgaagaatgggtgctgaccaacatcaatatcggccttttgtacatcctgatgattacctcgctgtcggtttacggcgtgatcatcgcgggctgggcttccaactccaaatattcgttcttgggtgcaatgcgtgcttccgcacaaagcatttcctacgagattgccatgagtgccgcgctggtgtgcgttgtgatggtatcgggcagcatgaacttctccgacatcgttgccgcacaagccaaaggcatcgcgggcggttccgtgttctcgtggaactggctgccgctcttccccatcttcatcgtttatctgatttccgccgttgccgaaaccaaccgtgcgccgtttgacgtggcagagggtgagtctgaaatcgttgccggtcaccacgtcgaatattccggcttcgcgttcgcgctgttcttccttgccgaatacattttcatgattctgattgccgcgctgacctcgctgatgttcctcggcggctggctgtctccgttcccgcaaagctggggcattgtcggcacgccttccgcattctggatgtttgtgaaaatggcggcggttctgtactggtatctgtggatacgcgccaccttcccacgctaccgctacgaccaaatcatgcgtttgggctggaaagtgctgattccgatcggcttcgcctacatcgtgattttgggcgtgtggatgatttcaccgctgaatttgtggaaataa

SEQ ID NO: 72172 - DNA, 1311 bp, Neisseria meningitidis; identical to SEQ ID NO: 54663

SEQ ID NO: 72173 - DNA, 684 bp, Neisseria meningitidis
gtgcaggcggatttagcctacgccgccgaacgcattacccacgattatccgcaagcaaccggtgcaaacaacacaagcacagtaagcgattatttcagaaacatccgtgcgcattccatccacccccgggtgtcggtcggctacgactttggcggctggagaatagcggcagattatgcccgttacagaaaatggaacaacaataaatattccgtcaacacaaaaaatgtgcaaaaaaacgacaatggcaacaggcaagacctgaagacggaaaatcaggaaaacggtacattccacgccgtttcttctctcggcttatccgccatttacgatttcaaactcaacgataaattcgataaattcaaaccctatatcggtgtgcgcgtcgcctacggacacgtcagacacagcatcgattcgaccaaaaaaacaacaaatgttgttaccgtcgccggtgctgctaacacagcacctacgatttattatgcaccagagacgcaaaacgcctatcacgaaagccacagcatccgccgcttgggtcttggtgtcatcgccggtgtcggtttcgacatcacgcccaagctgaccttggacaccggataccgctaccacaactggggacgcttggaaaacacccgcttcaaaacccacgaagtctcattgggcatgcgctaccgcttctga

SEQ ID NO: 72174 - DNA, 462 bp, Neisseria meningitidis; identical to SEQ ID NO: 43699

SEQ ID NO: 72175 - DNA, 174 bp, Neisseria meningitidis; identical to SEQ ID NO: 36913

SEQ ID NO: 72176 - DNA, 711 bp, Neisseria meningitidis; identical to SEQ ID NO: 42623

SEQ ID NO: 72177 - DNA, 369 bp, Neisseria meningitidis
atgattcaaatgcagaccatcttagatgtggctgataactctggtgcgcgtcgcgtaatgtgtatcaaggtattgggcggatctaagtgtcgctacgcttctgttggcgatattattaaagtggcagttaaagatgcggctccgcgtggccgtgtcaaaaaaggcgatgtatataatgcggtagttgttcgtactgctaagggtgtacgtcgtcctgatggtgcgttaattaaattcgataacaatgccgccgtgttactgaataataaacttgaacctttgggtactcgtatctttggtccggtaacccgtgaattgcgtactgagcgatttatgaaaatcgtttcattggcacctgaagtattataa

SEQ ID NO: 72178 - DNA, 279 bp, Neisseria meningitidis; identical to SEQ ID NO: 37183

SEQ ID NO: 72179 - DNA, 483 bp, Neisseria meningitidis; identical to SEQ ID NO: 54865

SEQ ID NO: 72180 - DNA, 237 bp, Neisseria meningitidis; identical to SEQ ID NO: 45833

SEQ ID NO: 72181 - DNA, 192 bp, Neisseria meningitidis
ttgccgaaattcggggaatgccctctccccaaccctcccccacgggggagggggcaggttgcagcagattcaggcgttgcaggtcgtctgaaaaagaatgcccgaaacatcgacagcgggaatgtttcaggcagcctttatcgcaaggcaggtggaacaaacgttgcgaacgttttttcagacgacctttga

SEQ ID NO: 72182 - DNA, 1593 bp, Neisseria meningitidis; identical to SEQ ID NO: 42823

SEQ ID NO: 72183 - DNA, 1404 bp, Neisseria meningitidis; identical to SEQ ID NO: 39890

SEQ ID NO: 72184 - DNA, 2463 bp, Neisseria meningitidis
atgacacaaaaagaaaagcattttgaggaatatgccgccttggcaacccttcctttgcgggatgtcgtcgtttacccgcatatggttctgccgctgtttgtcggcagaccgaaatccatcgccgcactggaaaacgccattacccgcgaggagccggttttcctgttggcgcaaaccgatgcggcggtagaagaaccgattgccgccgacctgtatcagaccggtacggtcgcacaagtcctgcaagtgttgaaactacccgacggcacggtaaaagtattggtcgaagggctgtatcgcggacgtgttctgactattgaagacacgggcgggctgttcgtttcccatatagaggcggtcgtggaagaagacacgggcggcaataccgacctcgaagccgtgcgccgcaccctgttggcgcagtttgaacaatacgccaaactcaataaaaaaatccccgccgaaattatcggcagcattaacggcattgccgaaaacagccggctaaccgatacagtcgcagcgcatttgcagttgaaactgacgcaacgccaacagattttggagatttccgaaatcggcaaacggatggaattcctgctggcacagctggaatccgaactcgacattatgcaggccgaaaaacgcatacgcggacgcgtcaaacgccaaatggaaaaatcccagcgcgaatattatctgaacgaacagattaaagcgatacacaaagaattgggcgaagaagacgaaaacggcgaactggatgccttggaagcaggcatcaaaaaggcgggtatgagtaaagaagcggaagaaaaatgcctgtccgaactgaaaaaactcaaaatgatgccgccgatgtctgccgaatccaccgtcgtacgcaactacatcgacaccctgctcgaactgccgtggaagaaaaaatcccgcgtcagcaaagacatcgccaaagccggactggtgctggatgccgaccactacggcctggaaaaagtcaaagaacggattttggaatacctcgccgtccaaaaacgtatggacaaactcaaaggcccgattctgtgcctggtcggccctccaggcgtgggcaaaacctctttgggcgaatccatcgccaaagcaacggggcggaaatatgtccgcatggctttgggcggcgtgcgcgacgaaagcgaaatccggggacaccgccgcacctatatcggctccatgcctggtaagattctgcagaatatggcaaaagccggcgtaaaaaacccattgttcctgctcgacgaaatcgacaaattgggtagcgacttccggggcgatcccgccagcgcgttgctcgaagtgcttgatcccgagcaaaacaacaagttcgccgatcattatgccgaagtggattacgatttgagcgatgtgatgtttattgcgacttcaaacagcctgaatatcccgaccccgctgctcgaccgtatggaaatcatccgtctgtccggctataccgaagacgaaaaaatcaatatcgcgatgcagtacctcgtgccgaagcaaatgaagcgcaacggcgtgaaagaaggggaattggcaatcgaagaaagcgcggtgcgcgatattatccgttactacacccgcgaggcgggcgtgcgttcgctcgaccgcgagattgccaaaatctgccgcaaggtggtgatgcagattaccttggacgaagataagaagaggttgtctgaaaccaagaaaaccagcaaagccaaacctaaagcggttaaagtaaatgagaaaaatctgcacgactatttgggtgtgcgccgcttcgattacggcgttgccgaaagcgaaaaccgtatcggacaagtaaccggtctggcgtggacagaagtcggcggcgaactgctgaccgtcgaagccgcagcattgccgggtaagggcgtgattcagtgcaccggccagttgggcgatgtgatgaaggaatccgtgtctgcagcgtggtcggttgtccgctcccgcgcggaatcagtgggcttggctcctgatttttacgagaaaaaagacatccatgtccatgttcccgaaggtgcgacgccgaaagacggtccgagtgcgggcattgccatgactttggcgatggtgtctgcattcaccaaaatcccggtgcgcgccgatgttgccatgacgggcgaaattaccctgcgcggcgaagtcctgccgattggcggtctgaaggaaaaactgttggctgcgcttcgcggcggcatcaaacacgttttaattccaaaagacaacctcaaagacttggaagaaatccctgaaaacgtgaaaaccggcctgaccatccatccggtcaaatggatagacgaggtattggctctgggtttggaaagccagcctgagccttgggcagaaccttctggtgcggaagcggcggcggaatccgcttcaaaaccaaaaccccgcagcagggcaaccaaacattga

SEQ ID NO: 72185 - DNA, 435 bp, Neisseria meningitidis; identical to SEQ ID NO: 66112

SEQ ID NO: 72186 - DNA, 768 bp, Neisseria meningitidis
atgcaagaaataatgcaatctatcgtttttgttgctgccgcaatactgcacggaattacaggcatgggatttccgatgctcggtacaaccgcattggcttttatcatgccattgtctaaggttgttgccttggtggcattaccaagcctgttaatgagcttgttggttctatgcagcaataacaaaaagggtttttggcaagagattgtttattatttaaaaacctataaattgcttgctatcggcagcgtcgttggcagcattttgggggtgaagttgcttttgatacttccagtgtcgtggctgcttttactgatggcaatcattacattgtattattctgttaatggtattttaaatgtatgtgcaaaagcaaaaaatattcaagtagttgccaataataagaatatgattctttttgggtttttggcaggcatcatcggcggttcaaccaatgccatgtctcccatattgttaatatttttgcttagcgaaacagagaataaaaatcgtatcgcaaaatcaagcaatctatgctatcttttggcgaaaattgttcaaatatatatgctaagagaccagtattggttattaaataagagtgaatacggtttaatatttttactgtccgtattgtctgttattggattgtatgttggaattcggttaaggactaagattagcccaaatttttttaaaatgttaatttttattgttttattggtattggctctgaaaatcgggcattcgggtttaatcaaactttaa

SEQ ID NO: 72187 - DNA, 1467 bp, Neisseria meningitidis; identical to SEQ ID NO: 60142

SEQ ID NO: 72188 - DNA, 435 bp, Neisseria meningitidis; identical to SEQ ID NO: 56042

SEQ ID NO: 72189 - DNA, 216 bp, Neisseria meningitidis; identical to SEQ ID NO: 43890

SEQ ID NO: 72190 - DNA, 744 bp, Neisseria meningitidis; identical to SEQ ID NO: 55012

SEQ ID NO: 72191 - DNA, 981 bp, Neisseria meningitidis; identical to SEQ ID NO: 56057

SEQ ID NO: 72192 - DNA, 336 bp, Neisseria meningitidis
atgcaaatgcactggctctttctgactgtagcaattttaagcgaagtctgcggttcttccatgctcaaactgagtggcgggtttagcaaactgtggccttctattggcgtgatagtcagcttttcggtgtgtttttgggccttgtctatcgcgttaaaaaccatgccgctggggacggcttacgcgatttgggcgggcatggggctggttttaacggcactcatcagtgtggtgtttttcgggcagaagcctgattttatcggcattgtcagcatcggtttgattttgctgggcgtggtgctgctcaataccatgtcgcatatgtcggggcattga

SEQ ID NO: 72193 - DNA, 1332 bp, Neisseria meningitidis; identical to SEQ ID NO: 48039

SEQ ID NO: 72194 - DNA, 375 bp, Neisseria meningitidis; identical to SEQ ID NO: 56062

SEQ ID NO: 72195 - DNA, 2112 bp, Neisseria meningitidis
atgaaaatatcatttcatttagctttattacccacgctgattattgcttccttccctgttgctgccgccgatacgcaggacaatggtgaacattacaccgccactctgcccaccgtttccgtggtcggacagtccgacaccagcgtactcaaaggctacatcaactacgacgaagccgccgttacccgcaacggacagctcatcaaagaaacgccgcaaaccatcgatacgctcaatatctagaaaaacaaaaattacggtacgaacgatttgagttccatcctcgaaggcaatgccggcatcgacgctgcctacgatatgcgcggcgaaagcattttcctgcgcggttttcaagccgacgcatccgatatttaccgcgacggcgtgcgcgaaagcggacaagtgcgccgcagtactgccaacatcgagcgcgtggaaatcctgaaaggcccgtcttccgtgctttacggccgcaccaacggcggcggcgtcatcaacatggtcagcaaatacgccaacttcaaacaaagccgcaacatcggtgcggtttacggttcgtgggcaaaccgcagcctgaatatggacattaacgaagtgttgaacaaaaacgtcgccatccgtctcaccggcgaagtcgggcgcgccaattcgttccgcagcggcatagacagcaaaaatgtcatggtttcgcccagtattaccgtcaaactcgacaacggcttgaagtggacggggcaatacacctacgacaatgtggagcgcacgcccgaccgcagtccgaccaagtccgtgtacgaccgcttcggactgccttaccgcatggggttcgcccaccggaacgattttgtcaaagacaagctgcaagtttggcgttccgaccttgaatacgccttcaacgacaaatggcgtgcccaatggcagctcgcccaccgcacggcggcgcaggattttgatcatttctatgcaggcagcgaaaacggcagcctaattaaacgcaactacgcttggcagcagaccgacaacaaaaccctgtcgtccaacttcacgctcaacggcgactacaccatcggccgttttgaaaaccatctgaccgtaggcctggattacagccgcgaacaccgcaacccgacattaggttacaaccgcccctttaccgcctccatcaacccctacgaccgcgcaagctggccggcttcgggcaggctgcaacccgtcttcacccaaaaccgccacaaagccgactcctacggcattttcgtgcaaaacatcttctccgccacgcccgacttgaaattcgtcctcggcggtcgttacgacaaatacacctttaattccgaaaacaaactcaccggcaacagccgccagtacagcggccactcgttcagccccaacatcggcgcagtgtggaacatcaaccccgttcacacactttacgcctcgtataacaaaggtttcgcgccttatggcggacgcggcggctatttgagcatcgatacgtcatcttctgccgtgtttaacgccgaccccgagtacacccgccaatacgaaaccggcgtcaaaagcagttggctggacaatcgtttggacaccacattgtccgcctaccaaatcgaacgcttcaatatccgctaccgccccgacgcggaaaataatccctacacttgggcagtcggcggcaaacaccgttcgcgtggcgtggaattgtccgccatcgggcaaatcatccccaaaaaactctatctgcgcggttcgttgggcgtgatgcaggcgaaagtcgttgaagacaaaaaaaatcccgaccgagtgggcatccatttgaataataccagcaacgttaccggcaacctgtttttccgttatacaccgaccgaaaacctctacggcgaaatcggcgtaaccggtacaggcaaacgctacggttacaactcaagaaataaagaagtgactacgcttccaggctttgcccgagttgatgccatgcttggctggaaccataaaaatgttaacgttacctttgccgcagccaatctgttcaatcaaaaatattggcgttcggactctatgccgggtaatccgcgcggctatactgcccgggtaaattaccgtttctga

SEQ ID NO: 72196 - DNA, 1176 bp, Neisseria meningitidis; identical to SEQ ID NO: 38454

SEQ ID NO: 72197 - DNA, 1164 bp, Neisseria meningitidis; identical to SEQ ID NO: 45977

SEQ ID NO: 72198 - DNA, 1266 bp, Neisseria meningitidis; identical to SEQ ID NO: 55965

SEQ ID NO: 72199 - DNA, 558 bp, Neisseria meningitidis; identical to SEQ ID NO: 36535

SEQ ID NO: 72200 - DNA, 1218 bp, Neisseria meningitidis; identical to SEQ ID NO: 56067

SEQ ID NO: 72201 - DNA, 927 bp, Neisseria meningitidis; identical to SEQ ID NO: 56068

SEQ ID NO: 72202 - DNA, 321 bp, Neisseria meningitidis
atgggtatgaatcaacaacgtttgactcaagtgattttggcacctatcgtttctgaaaaaagcaacgtattggctgaaaaacgcaaccaaatgacgtttaaagttttggcaaatgcaaccaaacctgaaatcaaagctgctgttgagctgctgtttggtgttcaagttgcttctgtaactaccgttacaactaaaggcaaaactaagcgttttggtcgtactttgggccgccgcagcgatgttaaaaaagcttatgtaagcttggctgccggtcaagagttggatttggaagccgctgctgcagctgcagataaggaataa

SEQ ID NO: 72203 - DNA, 2760 bp, Neisseria meningitidis; identical to SEQ ID NO: 62157

SEQ ID NO: 72204 - DNA, 438 bp, Neisseria meningitidis; identical to SEQ ID NO: 56083

SEQ ID NO: 72205 - DNA, 1452 bp, Neisseria meningitidis
atgctttctttccttagcggcttattgagcttgggtatagaagtcttgtgggtaaggatgttttcgttcgcagcacagtccgtgcctcaggcattttcatttactcttgcctgttttctgaccggtatcgccgtcggcgcgtattttggcaaacggatttgccgcagccgctttgttgatattccctttatcgggcagtgcttcttgtgggcgggtattgccgactttttgattttgggtgctgcgtggttgttgacgggtttttctggcttcgtccaccacgccggtatcttcattaccctgtctgccgtcgtcagagggttgattttcccgctcgtacaccatgtgggtacggatggcaacaaatccggacgacaggtttccaatgtttatttcgccaacgttgccggcagtgcattgggtccggtccttatcggctttgtgatacttgatttcttgtccacccaacagatttacctgctcatctgtttgatttctgctgctgtccctttgttttgtacactgttccaaaaaagtctccgactgaatgcagtgtcggtagcagtttccctaatgttcggcatcctcatgttcctactgccggattctgtctttcaaaatattgctgaccgtccggataggctgattgaaaacaaacacggcattgttgcggtttaccatagagatggtgataaggttgtttatggggcgaatgtatacgacggcgcatacaataccgatgtattcaatagtgtcaacggcatcgaacgtgcctatctgctaccctccctgaagtctggcatacgccgcattttcgtcgttggattgagtacaggttcgtgggcgcgcgtcttgtctgccattccggaaatgcagtcgatgatcgttgcggaaatcaatccggcataccgtagccttatcgcggacgagccgcaaatcgccccgcttttgcaggacaaacgtgttgaaattgtattggatgacggtaggaaatggctgcgtcgccatcctgatgaaaaattcgacctgattttgatgaatacgacttggtactggcgtgcctattccaccaacctgttgagtgcggaatttttaaaacaggtgcaaagccaccttaccccggatggtattgtaatgtttaataccacgcacagcccgcatgcttttgctaccgccgtacacagtattccctatgcataccgctatgggcatatggtagtcggctcggcaaccccggtagttttccctaataaagaactgctcaagcaacgtctctcccggttgatttggccggaaagcggcaggcacgtatttgacagcagcaccgtggatgctgcagcacaaaaggttgtctctcgtatgctgattcagatgacggaaccttcggctggggcggaagttattaccgacgataatatgattgtagaatacaaatacggcagagggatttaa

SEQ ID NO: 72206 - DNA, 2025 bp, Neisseria meningitidis
atgaacgacatgactttatatttgataattgcccttgttccgttggcaggctcgctgattgcgggtttgttcggcaataaaatcggacgtgccggcgcgcatacggttacgatactcggtgtggcggtgtctgccgtgctgtcggcttatgtgctgtggggattcctcaatggcagccgtgccaagtttgacgagaacgtctatacctggctgacaatgggcggcttggatttctccgtcggcttcttggtcgatacgatgacggcgatgatgatggtcgtggtaacgggcgtgtcgttgatggtgcatatctacaccatcggctatatgcacgatgaaaaagtcggttaccaacgcttcttcagctatatttctttgtttactttcagtatgttgatgctgattatgagcaacaacttcatccagctcttcttcggttgggaagcggtgggcttggtgtcgtatctcttgatcggtttctatttcaaacgtccgagcgcgacatttgccaacctgaaagcctttttgatcaaccgtgtcggcgacttcggctttttgctcggtatcggcttggtgcttgcctatttcggcggcagcctgcgctatcaagatgtattcgcttatctgcctaatgttcagacggccaccattcaattgttccccagtgtggaatggtctttgattactgtaacctgtttgctcctgtttgtcggtgcgatgggtaaatcggcacaattcccgctgcacgtctggctgcctgattcgatggaaggcccgaccccgatttctgcattgattcacgccgcaaccatggttaccgccggtctgttcatggtatcgcgtatgtcgccgatttatgagatgagcagcactgcgctgtctgtcatcatggtaatcggtgcgattaccgccctgtttatgggtttcttgggcgtgattcaaaacgacatcaagcgcgtggttgcgtattccaccctgtcgcaactgggctatatgactgtggctctgggcgcgtctgcctattccgtggcgatgttccatgtgatgacccacgctttctttaaagccttgttgttcttggccgcaggtagcgcgattatcggtatgcatcacgaccaagacatgcgccacatgggcaacctgaaaaaatacatgccgattacttggttgaccatgttgatcggtaacttgtcgctgattggtacgccgttcttctccggcttttactccaaagattcgattatcgaagcggcgaaatacagcacccttcccggcagcggctttgcctattttgccgtccttgccagcgtgttcgttaccgcgttttacgcgttccgccaatactttatggtgttccacggcgaagagaaatggcgcagcctgcccgaacaccattcagacggacatggcgaagaacatcacggcttgggcaaaaacgacaatccgcacgaaagcccgctgttcgttaccctgcctttgattttgcttgccattccgtccgtcatcatcggctatgttgccatcgggcctatgctttacggcgatttcttcaaagacgtgattttcgtcaataccgacgcgcatccgaccatgcacatcatgaaggaagagttccacggcgcattggcaatggtgtcgcacagcctgcattctcctgtactctacctcgctatcgcaggtgtattgagcgcatggcttttgtacgtcaaactgccgcacctgcctgcgaaaattgcacaggcgttccgtccggtttacgttttgtttgaaaacaaatactacctcgacgccctgtatttcaacgtcttcgctaaaggcacgcgcgcactgggtaccttcttctggaaagtcggcgataccgccattatcgataacggcatcgtcaacggctctgccaaactggtcggcgcgattgccgcgcaagtgcgtaaagcccaaaccggctttatctacacctacgccgccgctatggtgttcggcgtattggtactgctcggcatgaccttctggggattgttcagataa

SEQ ID NO: 72207 - DNA, 1020 bp, Neisseria meningitidis
atgatgaaaatcaaagccctgatgattgccgccgcattgctggcagcagccgatgtccacgccgcaccgcaaaaggcaaaaaccgcatccgccaaagttgccaaagttgccaaagttgccaaagttgccgccacggcgcaaaaagaagccgcacccgcacaacagcagggcggtatccgcttttcagacggcattgccgccgttgccgacaacgaagtcatcacgcgccgccggcttgccgaagccgttgccgaagccaaagccaacctgcccaaagaggcgcagataagcgaatccgagctgtcccgacaggtgctgatgcagcttgtcaaccaatccctgattgtacaggcgggcaaacgccgcaacattcaagcaagcgaagcggaaatcgatgccgtcgtcgcaaaaaattccgccctcaaaaacctcagccccgcccaacgccgcgattttgccgacaacatcattgccgaaaaagtccgccagcaggcagtgatgcagaacagccgcgtgagcgaagctgaaatcgatgccttcctcgagcaggcgcaaaaacaaggcatcaccctgcccgaaggcgcaccgttgcgccaataccgcgcccaacacatcctgattaaagccgacagcgaaaacgccgccgtcggcgcggaaagcaccatccgcaaaatctacggagaggcccgcagcggcacagacttttccagcctagcgcgccaatattcgcaagacgcgagcgcgggcaacggcggagatttgggctggtttgccgacggcgtgatggttcccgcctttgaagaagccgtccacgcgctcaaacccggacaggtcggcgcgcccgtccgcacccaattcggctggcatatcatcaaattgaacgaagtgcgcgatgccggcacacctcaggaacgtatccgcaattccgtgcggcaatacatcttccaacaaaaagccgaacaggcaaccgtcaacctgttgcgtgacctgcattccggcgcgtatgtcgacatccgctaa

SEQ ID NO: 72208 - DNA, 2379 bp, Neisseria meningitidis
gtgctggcattgggcctctgcttcggcacgcattgcgccgccgccgatgccgttgcggcggaggaaacggacaatccgaccgccggaggaagcgttcggagcgtgtccgaacccatacagcctaccagcctgagcctcggttcgacctgcctgttttgcagtaacgaaagcggcagccccgagagaaccgaagccgccgtccgaggcagcggcgaagcatccatccccgaagactatacgcgcattgttgccgacaaggtggaaggacagtcgcaggtgcaggtgcgtgccgaaggcaacgtcgtcgtcgaacgcaaccggacgaccctcaataccgattgggcggattacgaccagtcgggcgacaccgttaccgcaggcgaccggttcgccctccaacaggacggtacgctgattcggggcgaaaccctgacctacaatctcgagcagcagaccggggaagcgcacaacgtccgtatggaaaccgaacaaggcggacggcggctgcaaagcgtcagccgcaccgccgaaatgttgggcgaagggcattacaaactgacggaaacccaattcaacacctgttccgccggcgatgccggctggtatgtcaaggccgcttccgtcgaagccgatcgggaaaaaggcataggcgttgccaaacacgccgccttcgtgttcggcggcgttccccttttctatacgccttgggcggacttcccgcttgacggcaaccgcaaaagcggcctgcttgttccctcactgtccgccggttcggacggcgtttccctttccgttccctattatttcaaccttgcccccaatctcgatgccacgttcgcgcccggcgtgatcggcgaacgcggcgcggtctttgacgggcaggtacgctacctgcggccggattatgccggccagtccgacctgacctggctgccgcacgacaaaaaaagcggcaggaataaccgctatcaggcgaaatggcagcaccggcacgacatttccgacacgcttcaggcgggtgtcgatttcaaccaagtctccgacagcggctactaccgcgacttttacggcaacaaagaaatcgccggcaacgtcaacctcaaccgccgtgtatggctggattatggcggcagggcggcgggcggcagcctgaatgccggcctttcggttctgaaataccagacgctggcaaaccaaagcggctacaaagacaaaccgtatgccctgatgccgcgcctttccgccgattggcgcaaaaacaccggcagggcgcaaatcggcgtgtccgcacaatttacccgcttcagccacgacagccgccaagacggcagccgcctcgtcgtctatcccgacatcaaatgggatttcagcaacagctggggttacgtccgtcccaaactcggactgcacgccacctattacagcctcaaccgcttcggcagccaagaagcccgacgcgtcagccgcactctgcccattgtcaacatcgacagcggcgcaacttttgagcggaatacgcggatgttcggcggcggagtcctgcaaaccctcgagccgcgcctgttctacaactatattcctgccaaatcccaaaacgacctgcccaatttcgattcgtcggaaagcagcttcggctacgggcagctctttcgcgaaaacctctattacggcaacgacaggattaacaccgcaaacagcctttccgccgccgtgcaaagccgtattttggacggcgcgacgggggaagagcgtttccgcgccggcatcggtcagaaattctatttcaaggatgatgcggtgatgcttgacggcagcgtcggcaaaaaaccgcgcaaccgttccgactgggtggcatttgcctccggcagcatcggcagccgcttcatcctcgacagcagcatccactacaaccaaaacgacaaacgcgccgagaactacgccgtcggtgcaagctaccgtcccgcacagggcaaagtgctgaacgcccgctacaaatacgggcgcaacgaaaaaatctacctgaagtccgacggttcctatttttacgacaaactcagccagctcgacctgtccgcacaatggccgctgacgcgcaacctgtcggccgtcgtccgttacaactacggttttgaagccaaaaaaccgatagaggtgctggcgggtgcggaatacaaaagcagttgcggctgctggggcgcgggcgtgtacgcccaacgctacgttaccggcgaaaacacctacaaaaacgctgtctttttctcacttcagttgaaagacctcagcagtgtcggcagaaaccccgcagacaggatggatgtcgccgttcccggctacatccccgcccactctctttccgccggacgcaacaaacgaccctga

SEQ ID NO: 72209 - DNA, 450 bp, Neisseria meningitidis; identical to SEQ ID NO: 68142

SEQ ID NO: 72210 - DNA, 651 bp, Neisseria meningitidis; identical to SEQ ID NO: 43953

SEQ ID NO: 72211 - DNA, 687 bp, Neisseria meningitidis; identical to SEQ ID NO: 36558

SEQ ID NO: 72212 - DNA, 951 bp, Neisseria meningitidis; identical to SEQ ID NO: 50204

SEQ ID NO: 72213 - DNA, 2049 bp, Neisseria meningitidis
gtgattcctgcctacattcctcttcgctctttcggtatacgtaaaattccgaatattacgcaatttctaccggaatattcacttaacaaaaccgtattcaacgcccaaaccatcattggctggggcttacgcccgaccacccaccaagcacgtgcttttgcacaatcacatggcttgccgtttgtagccttggaagacggttttttacgctcactgggcttaggcgtggccggttatccgcccttcgcactggtttacgacgatatcggcatctattacgacacaacccgcccatcgcgtttggagcagttgattttagccgcaaacatgccgtctgaaatgcttaaccaagcgcagcaggccattgatttgattttgacgcaccgtttgtctaaatataaccatgctctggatttttcagacggcctcgtacaagacagcaaaaacattgttttggtaattgatcaaactttcggcgatatggcgattcaatatggcggcgcagatgaagccacattccgccaaatgtttcagacggccttagccgaaaatcctgatgcggaaatctgggtcaaaacccatcccgatgtattgagcggcaagaaacagggttaccttactgatttggcacagcagccgcgtgtgcgtttattggctgaagacattaatccgatttcgctgctgcaagcggtggacaaagtgtattgcgtgacctcgcaaatgggttttgaagccttgttgtgcggcaagcctttggtaacgtttggtttgccgtggtatgccggatggggcgtgagtgacgaccgccatcctaaaatcgacagccttgttcaaacccaacgccgcgccccccgcaacttgctgcagctcttcgctgcagcctatctgcaatacagccgctacctcaaccccaataccggcgaagcaggcagcctctttgatgtcatcgactatctggcgacggtcaaacgcaaaaacgacaaattgcgtggcgagttgtattgcgttggtatgtctttgtggaaacgcgcggttgccaaaccgttctttaacgtaccctcttgccgtctgaaatttatctcttccacccaaaaactggcaggggtcaaactgtccgacgatgcacgcatccttgcctggggcaacggcaaagaggccatcgtccgctttgccgaacaacaccacatccccctgctgcgcatggaagacggctttatccgctcggtcggactcggctccaacttagtgccgccgctgtcgctcgttaccgacgatatgagcatttatttcaatgccgaaaccccgtcccgtcttgaatacatcctacaaaaccaaaacttcgacgatcaagactttcagacggccttgaagctgcaaaaaatgctgaccgaaaaccacatcagtaaatacaacgtcggcagctcagacttcaccgccccgtcaaccgacaaaaccgtgatcctcgttcccggccaggttgaagatgatgcgtctatccgctacggttcgccccaaatctaccgcaatctggatttgctccgtaccgtacgcgaacgaaaccccaatgcctatatcatctacaaaccgcatcccgatgtagtcagcggtaaccgcatcggccatatttcccctgaagatgctgcacgatatgccgaccaaaccgccgagcaaaccgacatcctgacctgtctccaatacgcagacgaagtacataccatgacttcgctgaccggttttgaagccttgttgcgcggcaaaaaagtcagctgctacggcctgcctttttacgcaggctggggacttacccaagatctgctccccattccgcgccgtagccgcagacttgagctttggcagctgattgccggcacgctcatccactatcccgactacatccaccccgaaacccatcaggccataaatgcagaaaccgcagcccaaatcctgatacgacaaaaaaatatgcaaaaaaacaacaacggattacatcgcgggtgctttgccaaaaaattaggtaaaatcaaacaactatatcgatctttcaaataa

SEQ ID NO: 72214 - DNA, 969 bp, Neisseria meningitidis; identical to SEQ ID NO: 62168

SEQ ID NO: 72215 - DNA, 516 bp, Neisseria meningitidis
ttgagcgaacaatcagaaatattacaaaaaatgccaatcgaaaagcaaaaggagaagagcatggtcgacgcggtcgttaaaactcccgaatttttaccttttacttctgtaggaatattccgttttggtgcggatataacagagtacaaaaacatactggaaacttttatgtatgaacctcctgatgagtttagaacagaatattatgaatctcccgactcaaatttactcatttccgtcaaaaaaaacaaaattatttcgatattttgttatcaggagctatattttatgggcgttaatataataggtctgaattttgaagattttaaacagcttttccatcaccctaaatcatacggtgttgataaatattatttatcaaatgaatcttatccgacatatgtctatgagtttgatgaaataggagtacaagcatgggaagcaaaagggaaaattgttactatcattgccgggggcaaagacaattattcaacagaaccttactacgatgaataa

SEQ ID NO: 72216 - DNA, 1107 bp, Neisseria meningitidis; identical to SEQ ID NO: 56105

SEQ ID NO: 72217 - DNA, 1386 bp, Neisseria meningitidis
atggtcagcatttttgatattttcaaaatcggtatcgggccttccagttcgcatacggtcggcccgatgaaggcagccgccgcctttgcggcaggtttggatgcacaggctgttcgcatcgtcatcgacatttacggctcgctcgccctgaccggatacggacacggtacatttgacgcactgatgctcggtttggaaggcagcctgccgcacgacatcccgcttgtcggcattcccgaacgcctcgaacgcatccgcacgcagcacatcctccggctcaacgggcaagaaatccgcttcatccccgaccgcgacctgaacatactcggcaatcaagtgctgcccaaacaccccaacggcctgcgttttaccgcctatgcttcagacggcacggtattgaatgaacaggtttattattcggtcggcggcggctttgtcgttaccgaagaagattttgaccggcaggcggaaacggaaaaagccgttccctatccctataccagttgcgccgaactgcttgcccgatgccgtctgaaccggctcgacatctccgaagtcgtgttggcaaacgaagccgcgcttgccggatgcggcgaagccgaaatccgccgccgcgccgctgccgttgccgaggttatggaaggctgcatcaaacgcggcttgggtgcggacggcgaactgcccggcggattgaacgcccgccgccgcgccccgcagcttgccgccaagctcaaagtcctgcgcgaaaccgaaatcgtcaacacccagctctggccgatggtgtacgccatggcggtcaacgaagaaaacgccgccggcggacgcgtcgttaccgcaccgaccaacggcgcggcaggcatcattcccgccgtattgcactatttccgcaagttcaatccgcacgccacacaggaacgcgtcgaaaacttcctgctcaccgcaggcgcaatcggcatcctctacaagaccaacgcctccatttccggtgcggatgtcggctgtcagggcgaagtcggcgtagcgtgttcgatggcggcgggcgcatacgcctaagtcatcggcggcacgcccaaacaagtggaaaacgccgccgaaatggcgatggaacaccatttggggctgacttgcgaccccgtcggcggactggtgcaaatcccctgcatcgagcgcaacggcatcgccgccgaaaaagccctcaaactcggcacgctcgcgcttttggaagacggcacggacaaaaaagtctcgctcgacgaagtcatccgaaccatgctgcaaaccggccgggatatgaaggcgacctacaaagaaacctcgcttgccggactcgccgccacgctccggaaaaaagccgtccccgtatccgtgcgcgtggtcgagtgctga

SEQ ID NO: 72218 - DNA, 432 bp, Neisseria meningitidis; identical to SEQ ID NO: 36540

SEQ ID NO: 72219 - DNA, 486 bp, Neisseria meningitidis; identical to SEQ ID NO: 46001

SEQ ID NO: 72220 - DNA, 315 bp, Neisseria meningitidis; identical to SEQ ID NO: 37950

SEQ ID NO: 72221 - DNA, 561 bp, Neisseria meningitidis; identical to SEQ ID NO: 36282

SEQ ID NO: 72222 - DNA, 819 bp, Neisseria meningitidis; identical to SEQ ID NO: 56109

SEQ ID NO: 72223 - DNA, 405 bp, Neisseria meningitidis; identical to SEQ ID NO: 43748

SEQ ID NO: 72224 - DNA, 411 bp, Neisseria meningitidis; identical to SEQ ID NO: 42958

SEQ ID NO: 72225 - DNA, 438 bp, Neisseria meningitidis; identical to SEQ ID NO: 42580

SEQ ID NO: 72226 - DNA, 393 bp, Neisseria meningitidis; identical to SEQ ID NO: 43975

SEQ ID NO: 72227 - DNA, 705 bp, Neisseria meningitidis; identical to SEQ ID NO: 56111

SEQ ID NO: 72228 - DNA, 321 bp, Neisseria meningitidis; identical to SEQ ID NO: 56112

SEQ ID NO: 72229 - DNA, 1197 bp, Neisseria meningitidis; identical to SEQ ID NO: 62184

SEQ ID NO: 72230 - DNA, 390 bp, Neisseria meningitidis; identical to SEQ ID NO: 43980

SEQ ID NO: 72231 - DNA, 399 bp, Neisseria meningitidis; identical to SEQ ID NO: 46943

SEQ ID NO: 72232 - DNA, 378 bp, Neisseria meningitidis; identical to SEQ ID NO: 56115

SEQ ID NO: 72233 - DNA, 564 bp, Neisseria meningitidis; identical to SEQ ID NO: 62189

SEQ ID NO: 72234 - DNA, 465 bp, Neisseria meningitidis
atggcaatttggaattatcggtactaccttatcccatcagctgctatcagaaataaatttaatgcaaataaagatatcatacttgatgagtatcgatctaatggttttcagaattttaatgagaataaaagttttgaaaattactttatcgataatgatgttatattattatcaataataaatgaagcaaaaaaacagcttaaattaaaagagtcttgggataaagacgcaatcatgttttgtgataattttggtaatagtcttaccgtttggccagatgatatagagtgcgaacttgatttaagatttgattatactaaatttattcagaaaaccattgattgggcaataaaatataattgtctacttgtaatagaaaaaacaggaaatgtagtttcccctaatataaataatctgatgtatgaaataaaagcatatttggaaagcaagccgtggcccatatga

SEQ ID NO: 72235 - DNA, 225 bp, Neisseria meningitidis; identical to SEQ ID NO: 60200

SEQ ID NO: 72236 - DNA, 264 bp, Neisseria meningitidis; identical to SEQ ID NO: 56117

SEQ ID NO: 72237 - DNA, 864 bp, Neisseria meningitidis
atgagtgagattggtttggtaaagatctattttggaaaagtgcgcgatttatatgaaatcgacgataaacgtatgctgatggtcgcttccgaccgcctgtctgcattcgatgtgattttggacgacctgattccgagcaaaggggagattctgacgcagatttccaatttttggtttaaaaaactggtgcatattatgcccaaccactttaccggtcaaacggtttacgatgttttgcctgaaaacgaagccaaagctttagagaaacgcgccgtcgtggctaaaaagctcactccggtgaaagtagaggcgattgtgcgtggttatctggcaggcagcggttggaaagattatcaaaaaaccggctcggtttgcggtattcaactgcctgaaggtatgcaggaagcgcaacaactgcctgaagtgatttttacgccctcaaccaaagccgcagtcggcgatcacgatgaaaacatcagctttgaagaatgcgaacgcattatcggaaaagaattggcggcggaagtgcgcgccaaagcgattcagctttatacagaagcggcggaatatgccaaatcgcgcggcatcatcatttgcgataccaaatttgaattcggtttggatacaaacggtacgctgacgctgatggatgaggtattgactcccgattcgagccgtttttggcctgccgaccaatacaaagtcggcaccaatccgccgtcttttgacaaacaattcgtccgcgactggctggaacaaagcggttggaacaaaaaagcccctgcgccgaaagtgcctgccgatgtgattcagaaaactgtcgagaagtatcgggaagcattgactttgctgactcaggattga

SEQ ID NO: 72238 - DNA, 1479 bp, Neisseria meningitidis
  misc_feature 6, 7, 8, 9, 10: 'n' is a, c, g or t
gtgtgnnnnntgccgcacactttatccactttgaaaactgcggacaaccgccccgccagtgtttacttgaaaaaagacaaaccgacgctgattaaattttgggcgagctggtgtcctttgtgtctgtccgaattgggacagaccgaaaaatgggcgcaagatgcaaaattcagctccgccaacctgattaccgtcgcgtctccgggctttttgcacgagaaaaaagacggcgacttccaaaaatggtatgccggtttgaattatcccaagctgcccgtcgtaaccgacaacggcggcacgatcgcccaaagcctgaatatcagcgtttacccttcgtgggcgttaatcggtaaaaacggcgacgtgcagcgcatcgtcaaaggcagcatcaacgaagcgcaggcgttggcgttaatccgcgacccgaatgccgatttgggcagcttgaaacattcgttctacaaacccgacactcagaaaaaggattcaaaaatcatgaacacgcgcaccatctacctcgccggcggctgcttctggggcttggaagcctatttccaacgcatcgacggcgtggttgacgcggtatccggctacgccaacggcaacacgaaaaatccgagctatgaagacgtgtcctaccgccatacgggccacgccgaaaccgtcaaagtgacctacgatgccgacaaactcagcctagacgacatcctgcaatatttcttccgcgtcgttgatccgaccagcctcaacaaacagggcaacgacaccggtacgcaataccgcagcggcgtgtactacaccgaccccgccgaaaaagccgtcatcgccgccgccctcaaacgcgagcagcaaaaataccaactgcccctcgttgttgaaaacgagccgctgaaaaacttctacgatgccgaggaataccatcaggactacttgattaaaaaccccaacggctactgccacatcgatatccgcaaagccgacgaaccgctgccgggcaaaaccaagaccgcaccgcaaggcaaaggcttcgacgcggcaacgtataaaaaaccgagtgacgccgaactcaaacgcaccctgaccgaagagcagtaccaagtgacccaaaacagcgcgaccgaatatgccttcagccacgaatacgaccatttgttcaaacccggcatttatgtggacgttgtcagcggcgaacctttgttcagctccgccgacaaatatgattccggctgcggctggccgagcttcacgcgcccgattgatgcaaaatccgttaccgaacacgatgatttcagctacaacatgcgccgcaccgaagtgcgcagccacgccgccgactcgcatttgggacacgtcttccccgacggcccgcgcgacaaaggcggactgcgctactgcatcaacggcgcgagcttgaaattcatcccgctggaacaaatggacgcggcaggctacggcgcgttgaagagtaaagtgaaataa

SEQ ID NO: 72239 - DNA, 2064 bp, Neisseria meningitidis
  misc_feature 6, 7, 8, 9, 10: 'n' is a, c, g or t
gtgtgnnnnnaggtcggttcgattctgggccacggcgcatatcaggctccggactggacggcggactggctgcatcgtgagttggttgcctggttggatctgactgcgcaagaaacttacggtaaaaaatttgacgaagtttctcctgaagaacaagctgttctgaaaacacgtttggctgacgaataccgcaaccaaagccgtgttaaggaagatggttctgttgttgtcagcgaaacccgcgtgaaagccatcgaaagcatcctgccttactaccacggtgtgtacagcgacgatcctaagttccaaaccactcgcgaacactttgcaatgaaaaacaatacattgccaagccaagaagcgcgtgaaaaactgttcaacttcttcttctggacttcttggtctgcttcgaccaaccgtcctgacgagaattttacttacaccaacaactggccgcacgaacctttgatcaacaacgtaccgaccactgaaaactatatgtggtcattcaccagcgttgttcttctgctgatgggcatcggtttgctgatgtggggttattccttcctgaccaaacacgaagaagtggaagtgccgtctgaagacccgatttccaaaatccaactgaccccttcgcaaaaagcattgggcaaatacgtcttcctgacggtcgccctgtttgtggtacaagtattgctgggcggcctgaccgcacactacaccgtcgaaggccagggtttctacggtatcgacgaggcgttgggctttgaaatgtccgactggttcccctacgccctgacccgtacttggcacatccaatccgctatcttctggattgcaaccggctttttgacggcaggtttgttcctcgcgccgattgtcaacggcggcaaagatcccaagttccaacgtgccggtgtgaacttcctctatatcgccctcttcatcgtggtcggcggttcttacgcgggcaacttcttcgcgttgacgcacatccttccccccgaatttaatttctggttcggacaccaaggttacgaatacctcgatttgggtcgtttctggcaactcctgctgatggtcggactgctgttgtggctgttcctgatgttgcgctgcacggtttccgccttcaaagaaaaaggcgtggacaaaaacctgctggcaatctttgtcgcttctatggtcggtgtgggcgtgttctacgcaccgggactgttctatggcgaaaaatccccgattgccgtaatggaatactggcgttggtgggtggttcacctgtgggtggaaggcttctttgaagtatttgccactgccgccttcgcatttgtcttctacaatatgggctttgtccgccgcagtaccgccactgcctccactttggccgctgccgccatctttatgttgggcggcgttccgggtacgctgcaccacctgtacttctccggctctacctccgcctctatggcaatcggcgcctgcttctccgctttagaagtcgtgccgctggtgttgctgggtcgtgaagcatacgagcattggtcttaccaacacctgtccgactgggcgaaacgcctgcgttggccgctgatgtgcttcgttgcagtcgccttctggaatatgatcggtgccggcgtattcggcttcctgatcaatccgccgatttccctgttctatatccaaggtttgaacacttctgccgttcacgcgcacgccgccttgttcggtgtgtacggtttcttggcattgggcttcgtattgctggttgcccgttatttgaaaccgaacgtgcagtttgacgacaaactgatgacttggggcttctggctgctgaacggcggtttggtgggtatgattgccatcagcctgttgccggttggcgtgattcaggcatacgcctccatcacgcacggtctgtggtatgcgcgtagcgaagagttcctgcaaatggaaatcttggatactctgcgttgggttcgtactgctgctgacttgatcttcatcggcggtgcaatctgtgtcgccatccaagccactaaaatcgtattcggccgcgacaaataa

SEQ ID NO: 72240 - DNA, 366 bp, Neisseria meningitidis
gtgtggggacgctatgaaaaattgcgaattttttatgacccgacaagggcaatctatgatagcggtgcagattatttaaccagagaaaaacatagattcgtcgtaattgcaaatagtgcttgggggctattgcttaatttatcttgttattatgacaaggttttggaaaagcggaaaataccgttcggcaaacaggaaattgatgacgatatggacaaagtgtccgcccataagcggaagtttaaagatatttctgaaatcaaagtaggggatggttgggaatacccgttcaattatgagcagggaatgaaagaattagatgaagtgctattgaaatacattcccttttttgaagaagaacgataa

SEQ ID NO: 72241 - DNA, 216 bp, Neisseria meningitidis
ttggatgcgggcgaatttagccatttccgtatcaatcacagcacacattttgccgaacgacaaaaccatattaatggaactgagaacttttggaaccaagcaaaacgtcatttacgcaagtttaacggcattcccaaagcgcattttgagctgtatttaaaggagtgcgaatggcgttttaacaacagtgagataaaagttcttgttccattttaa

SEQ ID NO: 72242 - DNA, 276 bp, Neisseria meningitidis; identical to SEQ ID NO: 56119

SEQ ID NO: 72243 - DNA, 969 bp, Neisseria meningitidis
  misc_feature 8, 9, 10, 11, 12: 'n' is a, c, g or t
gtgtgtgnnnnnctgaccgccgcaacccccgcgctggcagacattaccgtgtacaacggccaacacaaagaagcagcacaagccgttgcagatgcctttacccgggctaccggcatcaaagtcaaactcaacagcgccaaaggcgaccagcttgccggtcaaatcaaagaagaaggcagccgaagccccgccgacgtattctattccgaacaaatcccggcactcgccaccctttccgcagccaacctcctagagcccctgcccgcctccaccatcaacgaaacacgcggcaagggcgtgccggttgccgccaaaaaagactgggtggcactgagcggacgttcgcgcgtcgtcgtttacgacacccgcaaactgtctgaaaaagatttagaaaaatccgtcctgaattacgccacgccgaaatggaaaaaccgcatcggttacgcccccacttccggcgcgttcttggaacaggttgtcgccatcgtcaaactgaaaggcgaagcggccgcattgaaatggctcaaaggtctgaaagaatacggcaagccttacgctaaaaactccgtcgcccttcaagcggttgaaaacggcgaaatcgatgccgccctcatcaacaactactactggcacgctttcgcgcgtgaaaaaggcgtacaaaacgtccacacccgcctgaatttcgtccgccacagagatcccggcgcactcattacctattccggtgcagccgtgttaaaatcctcccaaaacaaggatgaggcgaaaaaattcgtcgccttcctcgccggcaaggaaggacagcgtgccctgaccgccgtccgtgccgagtatcctttgaatccgcacgtggtatccaccttcaatttggaacccatcgccaagttggaagcaccccaagtgtccgccaccactgtttccgaaaaagaacacgccacccggctgcttgagcaagccggtatgaaataa

SEQ ID NO: 72244 - DNA, 1356 bp, Neisseria meningitidis
atgtctgatttttttcattctgacgtgttgtccgtttccgagttgaacgcatttgccaaaagtattttggaaaaccaccttgccggtttgtggattgccggcgaagtgtccaacctgacccgtgccgccagcgggcattattatttctcgctcaaagacagccgcgcgcaggtgcgttgcgcgatgttcaagggtgcggcggcgcgtttggcgaaacctttgaaagaaggcgaccatatcgaagtggcgggcaaaatcagtatttatgaaacgcggggcgaatttcagattaccgtgaacgaagtgcggctcaagggcttggggcagctttacgaagcctacgagcggttgaaggcgcagttgcaggcggaaggcgcgtttgcggcggaacgcaagaaacctttgcccgcccgaccgcaatgtatcggcatcgtaaccagtctggcggcggcggctttgcgcgatgtcgttactaccttgaaacgccgcgcacccgaaatccccgttatcgtttatccgacacccgttcaaggcacaggcagcgagtttcagattgcccaagcgattaaaaccgcatcgcaacgcgccgaatgcgacgtgttgattgtctgtcgcggcggcggcagcattgaagatttgtgggcgtttaacgaagaaccggtcgtacgcgcaatcgaagcctgcacggttcccgtcgtcagtggcgtgggacacgaaaccgatttcacgcttgccgattttgtcgccgacgtgcgcgcgcccacgccgaccggcgcggcggaactggtcagccccaaccgccaagaatcgctacatcgtctcgcccaggcgcaaggccgtctgaaaaccgttttggaacaacgctatttcgatgccagccaaaaactcgactggcttgcgcggcaaatccgtcatccgcgccaaaaacttgatgagcagcgcgcttcaatcggcaagctggcgcaaacgctgtcttactctatgaagcaaaacctccgtgcccacaccgcccgttttgaacgccaaacccaagccctgcaacattaccgtcctgatgtttccgtttgcaaaaacaacatcgtccgccttcagacggcattgcccgccgccttcagccaactgcttacccaccgccgccaaagcctgaccgcccaagccgcattgctcgaagccgtttcgccgcagcacattttggaacgcggcttttccgtcgtcaaagatacacgcggacaagtcatccgcaacgccgatgttttgaagcaggggcagaagctgcacattaccttcgccgacggcgaaaccgacgtgcgcgtaagcaaagaacaagggcagcaggatttgttcgattgcatttaa

SEQ ID NO: 72245 - DNA, 354 bp, Neisseria meningitidis; identical to SEQ ID NO: 60208

SEQ ID NO: 72246 - DNA, 273 bp, Neisseria meningitidis
gtgtttgctgttattttcttttcgacattgggctgtattttagcatggataagagatattcctaaaataaaatcaaaaaaaattttggcaagatccttatatattataggaataataaatgtaataatcggctatgtattaattaaaaatatattggcttctgtttcggatgaagatggaataaaatatgttgcaatatatttatcaaatctttttttttggacagtattgatgtatgttcttgtgaaaagattatctaaaaagccaagctga

SEQ ID NO: 72247 - DNA, 111 bp, Neisseria meningitidis; identical to SEQ ID NO: 40033

SEQ ID NO: 72248 - DNA, 2226 bp, Neisseria meningitidis
ttgaaattcgcacaagaaaaatactggcgcaaagaaatcagcgagcaagaattgctggctgttgctaaagacttgcgcgagaaaaactggaaacaccaggtcgctgccaacgccgatttcgttgccgtaggcgatttcactttctacgaccacatcctcgacctgcaagtcgccaccggcgcgattcccgcccgcttcggcttcgacagccaaaacctgtctttggaacaattcttccaactggcgcgcggtaacaaagaccaattcgctatcgaaatgaccaaatggttcgacaccaactaccactacttggtgcctgaattccacgccgataccggattcaaagccaatgccaaacactatgttcaacaactgcaagaagcccaagccctcggtctgaaagccaaaccgaccgttgtaggtccgttgactttcctgtgggtgggtaaagaaaaaggcgccgtcgaattcgaccgtctgagcctgttgcctaaactgttgcctgtttacgttgaaatcctgactgctttggttgaagccggtgccgagtggattcaaatcgacgagcctgctttggctgtcgatttgcctaaagaatgggtggaagcctacaaagacgtttacgctactttgagcaaagtcaacgccaaaatcctgttgagcacttacttcggttctgttgccgaacacgccgcattgttgaaagccctgcctgttgacggtctgcacatcgacttggtacgcgcccccgagcaactggacgcgttcgccgactacgacaaagtcctgtctgccggcgtgattgacggccgcaacatttggcgcgccaacctgaacaaagttttggaaactgtcgagcctctgcaagccaaactgggtgaccgtttgtggatttccagctcttgctcgctgctgcacactccatttgacttgtcagttgaagaaaaactgaaagccaacaaacccgacctgtactcttggttggcattcaccctgcaaaaaaaccatgaattgcgcgttctgaaagatgcattgaacgaaggccgtgattatgttgccgaagaactcgccgccagccaagctgctgccgactcccgtgccaacagcagcgaaatccatcgtgcagacgttgccaaacgcctggccgatttgcctgccaacgcagaccaacgcaaatctccatttgccgaccgtatcaaagcgcaacaagcatggttgaacctacctctgctgctgacgaccaacatcggttctttcccgcaaaccaccgaaatccgccaggcacgatcagccttcaaaaaaggcgaactgtctgccgccgattaggaagccgcgatgaaaaaagaaatcgccttggtggttgaagagcaagaaaaactggacttggacgtactggtacacggcgaagccgagcgtaacgacatggttgaatacttcggcgaattgttgagcggttttgcattcactcaatacggctgggtacaaagctacggctcacgctgcgtgaaaccaccgattatctttggcgacgtaagccgtcctgaagccatgaccgtggcttggtctacttacgctcaaagcctgaccaaacgcccgatgaaaggtatgttgaccggccctgtaaccattctgcaatggtctttcgtccgcaacgatattccccgcgctaccgtgtgcaaacaaatcgcactggctctgaacgacgaagtattggatctggaaaaagcaggcatcaaagtcatccaaatcgacgaacctgccatccgcgaaggtctgcctttgaaacgtgccgattgggatgcctacctgaactgggcgggcgaatctttccgcctgtcctctgccggttgtgaagacagcactcagatccacacccatatgtgttactccgagttcaacgacatcttgccggccatcgccgctatggatgctgacgtcatcaccatcgaaacttcacgttccgatatggaactcttgaccgcgttcggcgaattcaaatacccgaacgacatcggcccgggggtttacgacatccacagcccgcgcgtaccgactgaagccgaagttgagcacctgttgcgcaaagccatcgaggttgtaccggttgagcgtctgtgggtgaatcctgactgcggcctgaaaacacgtggctggaaagaaactctggaacaactccaagtgatgatgaacgtaacccgaaaactgcgtgccgaattggcgaaataa

SEQ ID NO: 72249 - DNA, 1092 bp, Neisseria meningitidis; identical to SEQ ID NO: 62202

SEQ ID NO: 72250 - DNA, 411 bp, Neisseria meningitidis; identical to SEQ ID NO: 43989

SEQ ID NO: 72251 - DNA, 2237 bp, Neisseria meningitidis; identical to SEQ ID NO: 56128

SEQ ID NO: 72252 - DNA, 1224 bp, Neisseria meningitidis; identical to SEQ ID NO: 55268

SEQ ID NO: 72253 - DNA, 408 bp, Neisseria meningitidis; identical to SEQ ID NO: 52045

SEQ ID NO: 72254 - DNA, 1242 bp, Neisseria meningitidis
atgcagaaatggcaaaccgagctttattccacaccgctttggcttttacagactctcttgatagtttccgccgcttcggcggtgattctgtttttgacacggaaaacgcgtttcgggcgcgagtttgcctatatcctgcgcctttgtctgacaccgaaaagcgcggtcaaagtcttgctgctgattacggagatgattacgctggtgttaaccgaaatgcggctgaatgtgttgagtacctttatgtccaaagggctttacgactcgatgcaggatttaaatgcttcggcattttggatgtttgccgcaatgaacgcgggcgtggtgctgatacgggcgtttaacaacgtcgtcaacgacttcctcaatcaaggcttggcgattaaatggtcggagcggctcaacgaagtgctgacagcacgctggcttgccgacaaaaactactaccgcctgcaaatgcgccgccacgcgccggacaacatcgaccaacgtatccaacaggacgcacaggatttcatcgcctcgaccatcgaatttgtgcgcggcatggtcaattcggtcgttacctcgctggagtttgccgttgttttgtggggcttggcgggcatcctgaccgtgtttggctttgacattcctcgcggcattgtttggttcgtctttatctttgtaattttggcgacctttatcgccatgtggataggcaacccattgattcgttacaactatgaaaacgaaaagctcaacggcgactaccgttattccctcatccgcgtgcgcgaccacgccgaaagcgtggcgttttacagcggcgaaaaacacgaacacgaccggcttgccgaccgcttcaaagccattatccgcaaccgctggcgcattgcgcggcaaagcgtctgcctgagtggctttaacgatatgttcaccaacggcatcaagctttttcccattattttgcaagccccacgcctgtttgccggccaaatcaaaatcggcgacatccagcagaccgtccaagccttcgcacgactgcaaaacgcgctgtctttcttccggatgttctataacaaattcactgcctaccgcgcccgattggaacgtttgtacggctttttgctgagtacggaagaaaaacacagcacgcagcaacccgagattagcgaagtttcagacggcattgcactggaatgtaaggcggcggcagcttttgcacgaattggcggcagcttttgcaccgccgaagcgtag

SEQ ID NO: 72255 - DNA, 612 bp, Neisseria meningitidis; identical to SEQ ID NO: 55369

SEQ ID NO: 72256 - DNA, 1071 bp, Neisseria meningitidis
atgaaaatcgttttgaccacatctatggcaggcttgggcggcacggaaaccgccaccgtccgcctcgggcggctgctcaaacggcgcgggcacgacatcatccttgcttcttcggacgggccttttgtcggagaggcgcaagcatcgggcatccgttggcagccggttgatttttaccggggcgggcttgccggctacctcaaaagcacctttgcctacgcccggatgctgcgccgcgaacaacccgacatcatcgactgccaaatggcgcgcgtcgttccagcctgcgcccttgccgccaaaatcgtttcgccgaaaaccaaaatcatctaccactcgcacggtttggacgcggcaacctaccccaaaatcgccaaactcttcgacaagctgggcgtgtacatcatcggtaactgcaaacacgaacgcgaaaaactcatccgccacggtttccccgccgaccggattgtctacgcctacaacgcactcccccccccggaatttcctttccggaaaaccgaaaaagaatgcgccgtactcggcacgctgtcgcgtctggacaccatccgcgccgtgcatctgatgctggacattttcaaaaaaatggtcgaccgcgatatgcccgtacgcctgaacgtggcgggcataggcgaagaaatggacaatttgaaagcgcaggcggaacgtctgggcatagacggcaaagttaccttcctcggcggcgtgcgcgatttgaccgcctacttcaaagacgtggatattttggtgaacacgccccactgcatcggcgaccacggcgcaggcgtgggcaacaacatcttagaagccggactttacgacacacccgtcgttacctacgatatggcgggcatttccgaaatggtcgtcaacggggaaacgggttactgcatccccttcggcgacgaagaagcctttatcgccgccgtagacacgctcgtcagacaaccggagttgcgcgaagcaatgggcaaaaggctgcacgcacacgtcgccgcactctgttccgacgacgaaatctaccgtaccaccatggcggcctataccatgtaa

SEQ ID NO: 72257 - DNA, 998 bp, Neisseria meningitidis; identical to SEQ ID NO: 56135

SEQ ID NO: 72258 - DNA, 1179 bp, Neisseria meningitidis
atggctaaggaaaaattcgaacgtagcaaaccgcacgtaaacgttggcaccatcggtcacgttgaccatggtaaaaccaccctgactgccgctttgactactattttggctaaaaaattcggcggtgctgcaaaagcttacgaccaaatcgacaacgcacccgaagaaaaagcacgcggtattaccattaacacctcgcacgtggaatacgaaaccgaaacccgccactacgcacacgtagactgcccgggccacgccgactacgttaaaaacatgattaccggcgccgcacaaatggacggtgcaatcctggtatgttccgctgctgacggccctatgccgcaaacccgcgaacacatcctgctggcccgtcaagtaggcgtaccttacatcatcgtgttcatgaacaaatgcgacatggtcgacgatgccgagctgttggaactggttgaaatggaaatccgcgacctgctgtccagctacgacttccccggcgacgactgcccgattgtacaaggttctgcactgaaagccttggaaggcgatgccgcttacgaagagaaaatcttcgaattggctgctgcattggacagctacatcccgactcccgagcgtgccgtggacaaacctttcttgttgcctatcgaagacgtattctctatttctggtcgtggtacagtagtaaccggtcgtgtagagcgcggtatcatccacgtcggtgacgagatcgaaatcgtcggtctgaaagaaactcaaaaaaccacttgtaccggtgttgaaatgttccgcaaactgctggacgaaggtcaagccgacaacgtaggcgtgctgcgcggtaccaaacgtgaagacgtagagcgtggtcaagtattggctaaaccgggtacaatcactcctcacaccaagttcaaagcagaagtatacgtactgagcaaagaagagggcggccgccataccccgttcttcgccaactaccgtccccaattctacttccgtaccaccgacgtaaccggcgcggttactttggaagaaggtgtggaaatggtaatgccgggcgagaacgtaaccatcaccgtagaactgattgcgcctatcgctatggaagaaggtttgcgctttgcgattcgcgaaggcggccgtaccgtgggtgccggcgtggtttcttctgttatcgcttaa

SEQ ID NO: 72259 - DNA, 1371 bp, Neisseria meningitidis
atgtcttccccttcaaataccaatcgtcaaacctgatccagccgattaacctatatcctgaccgttgccggcgcgactgtcggtttcggcgcgacgtggcgtttcccgtatttggtcggtgaaaacggtggtggcgcgtatgtgtttttattctgtatcgcgatgctggttatcggcattccgatgattttggtggaaaatgtcatcggacggcgcaaaggcgtgaacgcgctggatgcgttcggcggcccgatgaacggcaaacccgtcgccaaaatttggaaactggtcggctggatgggcttagtcggtgcgttcggtatcatggcgtattacatggtactaggtggctgggtaatcagctatatcgttaatattattagcggaaacctgaatatttccagccctgtcaacggcgaactaacgaaaagcttctttaccgaacacatcgaaaacagcccttgggaaattgcgttctacactttcttgtttgtcgttgtgaaccaatggattttagtcaaaggcgttatcggcggtattgaaaaagcagcgaaatacctaatgccgctgttgtttttgttcctgattgccatggtcgtgcgcaacgttaccctgccgggtgcaatggaagggattactttctatctgaagcctgatttcagtaagattaccaccgagcttttcgtcttcgttttgggacaagtatttttcgccttaagcttgggtttcggcgtgatgattaccttatccagctatctagataaaaacgaaaatctggttcagacggcagttatcacggcaattaccaataccatcatcgccgtacttgcgggctttatgattttcccgtcgctcttcagcttcggcgtcgcgcccaattctggcccgactttggtattccaaagtttgccgattgtgttctcacatatgtgggcaggacctgtgttcgctgtcattttcttctctctgctcctgattgccgcgctgacaacttcgctgacgatttatgaagtgttgattacgaccattcaggaaaaaaccaaaatccgccgtaccgccgcaatcacgattgtattgtccgccatcttcatcttcggcaatattccgtccattctgagctatggcccgtggaaagatgtttccatatttggcaaaaatatttttgacgcttttgactacatcagcggcaacatcttgtttatgctgaccgcgctcggctccgcgctgtttgtcggttttgtgatgaaggatgaagcgaaggacgaattgctttataaaggcaaccatataacggtcaatatttggtttgcctatgtgaaataccttgtgccgctggtgattttgctgattttcgtcagcaacctgttctaa

SEQ ID NO: 72260 - DNA, 777 bp, Neisseria meningitidis; identical to SEQ ID NO: 56137

SEQ ID NO: 72261 - DNA, 903 bp, Neisseria meningitidis; identical to SEQ ID NO: 56139

SEQ ID NO: 72262 - DNA, 1197 bp, Neisseria meningitidis
atgtggacgggatttttttcaaaatcaggcactggaattgcagaggaaaggcatcaaaaccgccgtgcttgcaccgatgttccgctacttgcggaaagaaacagcaagcatcctgaccgaccttacggttttgcaaaatatcggcaaagcggtttggacatctatgcatggcacggcatatatttcttcccccgctttccgttcatcgacatcgaccgcatccgctgggtgcgcgtgggtttgaaagccttcaaacactacatccgcgaaaacgggctgcccgacctgattcacgcccaccgcatgaactatgccggcatactcgcccaaaaaatttcccaaaaatacggcatcccctatgtcgtcacgaaacacagcagcaccattacgcgcggtctgatccgtccccaccaatggcagcctatgaaaaatgcggcggcgcacgccgccgcacgtctcgccatcagccgccatttcgcacacgtcctgcaacacaaatacggctgcgaatggcagtacctccccaacatactgggcggaatattcaaccgaccgtttgaacaaagagaaaaaaacaacaaaccgcatttcgtgttctgcaccgtctcgcaccttcgccgtctcaaaggacacgatgtcctgctcactgcctttgctcgggcgttggcacaatgcccgcaactgcgtctaaacatcggcggcagcggacaggaagaacagcggctgaaacagcaggcggcagacttgggcattacccatgccgttacatttttgggcgcattgcagcccgaagcagtcttggatttgatgaggaacagcgacgcattcgtccttgccagccgcaccgaaaccttcggcgtggtctatatcgaagcactgtcccaaggattgcccgtcattgcaacacgctgcggcggtgcggaatctattgtttcagacggcaacggatatttggttcctgttgacgacgacgatgcccttgccgacgcactcatcaaaatgtatgaacaccactctgattttgaacctgcccgacttagggaaaactgtctgaacgaatttggcgaaaatgccgttataggcaggttgatcggcattttccgacaggcaatcgcagaatacggtaagaaaataccggtgaaatatagtggattaacaaaaatcaggacaaggcgacgaagccgcagacagtacaaa

SEQ ID NO: 72263 - DNA, 1575 bp, Neisseria meningitidis; identical to SEQ ID NO: 56143

SEQ ID NO: 72264 - DNA, 2187 bp, Neisseria meningitidis
atgaagacagacattcaaaccgaattaacccaagccctactaccacacgaaaaagtatgggcgaacgaagaaaaaaccattttagccaaaaacatcctgttggatttggtggaaaaaaccgacccgaccattatcggtttgttattgaataatgatgagttaaaacgccatttctttgtggaagtgaatggtgttttggtgtttaaattgcaggatttacgttttttcttggacaaacacagcgtcaataattcctacacaaaatacgccaaccgcattggtttgacggacggcaaccgctttttgaaagacaattcggatattgtgttggattttccgtttaaagattgcgtattgaatggcggacaaagcaccgaagaaggcgaagagatttattttaaacgcagtaatagccagccagccagccagccagccagccagccagccagccagccagccagccagccagccagccagccaatatacactaaattaacccgaaaaagacaagaaatcttttttaatcaaacgcttgcttttgatgaaatcgatcggctttttgacgcaaaagcattctcaaaattctctcgctataccgcagacggcaaacaagcggttggcgaaatcaaacgtcattcagacggcacacccgccgaaaatctcattatcaaaggcaataatctgatagccctacattcgcttgccaaacagtttaaaggcaaagtgaagttgatttatattgatccgccttattattttgttaaaaagaaacaacaagatagttttggttataacactaactttaaattatctacttggcttacatttatgaaaaatcgtttatcaattgccaaagaattattaactgatgatgggattattgttatttccattgatgatgacggaaatgcttatttaaagattttgttagatgaaatttttggatttgaaaattttatcggaaatttacccactattatgaatttaaaaggtaataatgatgaatatgcttttgcaggcactcacgaatacacactagtctttgctaaaaataaagataaatctactttttatgaatttccaatagatgaagataattttttagagaaatgggaagaagatgaaattgggttttataaaaaaggagctccaatgcgagcaacaggaaccgaagataaaagagaagatagacctgaaatgttctatccttttttggtaaaaaataacacagttagtacaattacagatgaagaattttctcaaatctataataaagatttagaagtattcaatgatgattttattcaaaaactaaaagagaaatacgaaaatcttggatacaattttattttacctattgctgataaacaatgggggcgttggcgttgggggtattcaataaagaataaggcaaggctgcagacggatattattgttagccaatctaaaaatggaatttccttgtataaaaaacaaagacctgaattagatgatttacctacaaaaaaacctaaaactattttttataaacctgaatacagtagtggtaatggaactgaacagatgaaaaatctttttggtgaaaaggcatttaaaaatcctaaaccagaagaacttatccaagattttattaccatcacaaccaacgaatccgacatcgtcttagactaccatcttggtagtggcacaaccgccgccgttgcccacaaaatgaaccgacaatatatcggtattgaacaaatggattatattgaaacgcttgccgttgaacgcttgaaaaaagtgattgatggcgagcaaggcggtatttccaaagccgtgaattggcaaggtggtggcgagtttgtttatgccgaacttgccccatttaacgaaaccgcaaaacaacaaattttggcttgcgaagattcagacggcatcaaaacgctgtttgaaggtttatgcgaacgctatttcttgaaatacaacgtcagcgtaaatgaatttagtcaaatcattcaagagcctgaatttcaatctttgccattagacgaacaaaaacaaatggtgcttgaaatgttagatttaaatcaaatgtatgtttcattatccgaaatggacgacgagcaatttgcagattgcctgaacgatgacgataaagcggtaagccgtgcgttctatcaagcggagaaaaaaaatggcgaataa

SEQ ID NO: 72265 - DNA, 984 bp, Neisseria meningitidis
atggctgcgtacgacagtttgatggtatttacaggcaatgccaatcccgaattggcacaacgtgttgtcaggcatttggacatttctttgggcaatgcttccgtatccaagttttcagacggcgaagttgccgtcgaactgttggaaaacgtacgcgggcgcgatgttttcatccttcagccgacctgtgcgccgaccaatgacaacctgatggaaatcctgacgatggcggatgcactgaagcgtgcttcggcaggtcgtattaccacagccattccgtatttcggctatgcgcgccaagaccgccgtccgcgttccgtccgcgttccgatttctgccaaactggtggcaaatatgctgtattcggcagggatcgaccgtgttttgactgtcgatttgcatgccgaccagattcaaggtttcttcgatattccggtggacaatatttatgccaccccgattctgttgaacgacatcaaacaacagcggattgaaaatctgaccgtcgtcagcccggacatcggcggtgtcgtccgcgcccgcgccgtggcaaaatccttgaatgccgacttggcaatcatcgacaaacgccgcccgaaagccaatgtggcagaagtcatgaacatcatcggcgatattcaaggcagaacctgtctgattgtggacgatatgattgacactgcaaatacgctgtgcaaagccgccgtcgccctgaaagagcggggggcggaacgtgtcttggcatatgccagccacgccgtattctctggagaggcggtcagccgtatcgcctcatccgaaatcgaccaggtggtcgtaaccgataccattcctttgtctgaagcggctaaaaactgtgaccgtatccgtcaggtaacgattgccggtctgttggccgaaaccgtccgccgcattagcaatgaagaatccgtctcatatctttttaatgaagaagtgatgacaggcagcatgttgctgccataa

SEQ ID NO: 72266 - DNA, 1527 bp, Neisseria meningitidis
atggattatccaccgcttaagggtgcggcattggcgtgggttacgctgtctttggggcttgccgtatttatggaagttttagatacgactatcgccaatgtcgccgttcccgtcatcgccggcaacctcggtgcggcaaccacgcaggggacgtgggtcattacttcttttgctgtggcaaacgccgtttccgtgccgttaacgggctttttggcaaaacgtatcggcgaggtcaaattgtttaccgccgccgctgtcggtttcgtcatcacatcgtggctgtgcggtattgcccccaaccttcagtcgctggttgttttccgcatcttgcagggctttatcgccgggccgctgattcccttgtcgcaaagcctgttaatggcatcctatccgcccgcaaaacggacgctggcactggcattgtgggcaatgaccgtcgttgtcgcccctgttctcgggccgatactcggcggctggatttccggaaactggcattggggttggattttcttcattaatatccctatcggtatcatatcggcatggattacatggaaacatttgaaatgtcgggaaacggaaaccgttaaaatgccgaccgactatgtcgggcttacattgatggtagtcggtatcggcgcgttacagatgatgttggacaggggtaaggaactcgactggttcgcctctggagaaatcattaccttgggcgtagtcgcactggtgtgcttgtcgtattttattgtttgggaattgggagaaaaatatccgattgtcgatttatcgctgtttaaagatcggaattttaccgtcggcatcattgccacatcattgggttttatggtgtatatggggacgctgaccctgctgccgttagtgttgcagaccaacctgggctatacctccacgtgggcggggcttgccgccgcgcccgtcggcatcctgcccgtcttcctgtctccgttaatcggcaggttcggcaataaaatcgatatgcgcctgctcgtaaccgccagcttcctgacctttgccttcactttctattggcgcaccgatttttatgccgacatggatatcggcaacgtcatctggccgcagttttggcagggagtaggcgttgccatgttcttcctgccgctgaccaccatcacactgtcgcacatgaagggcggacagattgccgccgccggcagcctgtcgaatttcttgcgcgtgctgatgggcggtgtcggcgtatccgtcgtcagcaccctgtgggaacggcgcgaagcgttgcaccacacacgctttgccgaacacatcacgccatattccgcaacattgcacgaaacggccgcgcatttgtcccagcacggcgtttccgacattcaaaccgcaggtattatcaacaataccattacccagcagggttttattatcggctcgaacgaaatctttatggcgggcagcttgttattcattatcatgatacccgtcatatggctggcaaaaccgccgttccacagcagtggcggcggtggacattga

SEQ ID NO: 72267 - DNA, 1533 bp, Neisseria meningitidis; identical to SEQ ID NO: 56150

SEQ ID NO: 72268 - DNA, 1398 bp, Neisseria meningitidis
atgaaaaaaattcaagcggatgtcgtcgtaatcggcggcggtactgccggtatgggtgcgtttcgcaatgcccgtttacattcggataatgtttacctgattgaaaacaatgtgttcggcacaacctgcgcgcgcgtgggttgtatgccttccaaactcttgattgccgccgcagaagcgcgccaccacgcattgcataccgacccgttcggcgtgcatttggacaaagacagcatcgtcgtcaacggtgagatcatgcagcgcgttaaatccgagcgtgaccttgtcggctttgtcgttgccgatgtggaagagtggcctgccgacaagcgcattatgggttcggctaaatttatcgacgagcataccgtccaaatcgacgagcatactcaaattacggcaaaaagtttcgtgattgctaccggttcgcgtcccgtcatcctgccgcaatggcagtctttgggcaatcgtttgattatcaacgatgacgttttctcatgggatacgctgcctaagcgcgttgccgtgttcgggccgggtgttatcggtttggaactgggtcaggcattgcaccgtttgggcgtgaaagttgaaattttcggtttgggcggaatcatcggcggcatttccgaccccgtcgtttcagacgaggcgaaagccgtgttcggcgaagaattgaaactgcatttggatgctaaaaccgaggtcaagctcgatgcagacggcaatgtagaagtccattgggagcaggacggcgaaaaaggcgtatttgttgccgaatatatgctggcagccgtgggccgccgtccgaacgttgacaatatcggtttggaaaatatcaatatcgaaaaagatgcgcgcggcgtacccgttgccgacccgctgaccatgcagaccagcattccgcatatctttattgcgggcgacgcgtccaaccaactgcccctgctgcacgaagctgccgaccaaggcaagattgccggcgacaatgcaggccgttacccgaatatcggcggcggtttgcggcgcagcaccatcggcgtggtgtttaccagtccgcaaatcggctttgtcggtctgaaatacgcgcaggttgccgcgcaataccaagccgacgaatttgtcatcggcgaagtatcgttcaaaaaccaaggccgcagccgcgtgatgctggtaaacaaaggccatatgcgcctgtatgccgaaaaagccaccggccgctttatcggcgcggaaatcgtaggccctgccgccgaacatttggcgcacttgttggcatgggcgcatcaaatgaagatgaccgttccgcaaatgctggatatgccgttctaccatcccgttatcgaggaaggtctgcgtaccgcgttgcgcgatgccgatgcgaaattgaaagcctga

SEQ ID NO: 72269 - DNA, 630 bp, Neisseria meningitidis; identical to SEQ ID NO: 56153

SEQ ID NO: 72270 - DNA, 1869 bp, Neisseria meningitidis
atgagccaagccttaccctaccgcccggacatcgacacattgcgcgccgccgccgtcttgtccgtcatcgtgttccatatcgaaaaaaattggctgccgggcggatttctcggtgtcgatatattctttgtgatttcaggctttttgatgacggcgatcctccttcgcgaaatgtcgggggggggggggttttccctgaaggcattttatatccgccgcatcaaacggattttgcccgcatttttcgccgtattggcggcaacgctgataggcggcttctttttattcaccaaagatgatttctttcttttatggaaatccgcgctgaccgccttgggtttcgcatccaacctgtattttgcaaggggcaaggactatttcgctcccgcgcaggaagaaaagcccctgctgcacatttggtctttgtcggtcgaagaacaattttactttgtctttccgatattgctgttgcttgtcgtccgcaaaagcctgcgcgtccaagccggcttcctcgccgcactgtgcgcgttaagccttgccacttcctttataccttccgcgttcgataaatattacctgccccacctgtgcgcctgcgaaatgctggtcggatcgctgaccgccgtgtggatgcgctgccggcaacctgccgtcggcagacgctgtgccgccgccggcgcattgtttgccgtgtgcatattgtcaacctgcctgttttcctattcggaacaaaccgcctatttcccgggccccgccgctttgattccctgtctggctgttgccgcgctgatttatttcaaccattacgaacacccgcttaaaaaatttttccaatggaaaatcaccgttgccgccggtttgatttcctattcgctttatctgtggcattggccgatattggcctttatgcgctatatcggcccggacaacctgccgccttattcgccggcggcggcaatcgtcctgactctggcgttttccctgatttcttatcactgcatcgaaaagccgtttaaaaaatggcaaggttcgttcgcacaatccgttttatggatttatgccttgcctatgctcattttgggggcgggctcattttttgcgatgaggctgccgtttatggcgcaatacgaccgcttggggctgacgcgttccaacacctcctgccacaacaataccggcaaacaatgcctatggggggatacggaaaaacagccggaactgctcattttgggcgactcccacgccgaccattacaaaacattcttcgatgccgtgggcaaaaaagaaaaatggtccgccactatggtttccgccgacgcctgcgcctatgtggaaggctacgcgtcccgtgtgttccaaaactgggcagcctgccgcgccgtttatcgctatgccgaagaacacctgccccggtattcaaaagtggttttggcgatgcgctggggcagccaaatgcccgaaaacagccgctcccttgcctatgatgccggttttttccaaaaattcgaccgtatgctgcataaactctcgtccgaaaaacaagccgtttacctgatggcggacaaccttgcctcgtcttacaacgtccagcgcgcctatatcttgtcttcacgcataccgggttaccgccaaaccctgcgcccggacgacgaaagcactctgaaagccaatgcacgcatcagggaattggcagccaaataccccaacgtctatattattgatgccgccgcctatatccccgcaaatttccaaatcggcggattgccggtttactcggacaaagaccacatcaacccttacggcggcacggaattggcgaagcgtttttccgaaaaacaacggtttctcgatacgcgccataaccattga

SEQ ID NO: 72271 - DNA, 533 bp, Neisseria meningitidis
atgtcacgtgtcgcaaaaaacccagtgactgttcccgctggtgtagaagtaaaatttggaacagaggcattagttattaagggtaagaacggtgaattgtcttttcctttgcattctgatgtagccattgaatttaatgatggcaaattgacttttgttgcgaataacagcagtaaacaagcaaatgcaatgtctggtactgctcgcgcattagtcagcaatatggttaaaggtgtttcagaaggttttgagaaaagattgcaattgataggtgtgggttatcgtgctcaagcacaaggtaaaatcttgaatctgtctttgggtttttctcatccgatcgtatatgaaatgcctgaaggtgtctccgttcaaactcctagccaaacagagattgttttaaccggctcggataaacaagttgttggtcaagttgctgctgagattcgtacgttccgtgctcctgagccttataaaggtaaaggtgttcgctatgtagcgaagtagtggtaatgaaagaagccaagaaaaataat

SEQ ID NO: 72272 - DNA, 978 bp, Neisseria meningitidis
atgcaagaaaacccgaccgtgtggctgttcgacctcgacaacacgctgcacaatgccgatgccggcctcttcacactcatcaaccgcgctatgacacgctatatggcacgccgcctcaaactctccgaatctgccgcgtccgacctgcgtcaagactattggcaccgctacggcgcaacgctcgccggactgcaaatccaccatcccgaaatcgacatcgccgaatttttgcgcgaaagccatccgatcgatgcaatcctgaccaggctgcacggcatggcggatacggaaaacaccctatgccgtctgaacgggcgcaaggcggttttttccaacggcccgtcgttttacgtccgtgccgttgtcggcgcactcggtttggaaaaccgtttcgacgcactgttcggcacggatgatttcgggctgctgtacaaacccaatccgcaagcgtatctcaatgtctgccgccttttggacgtaccgcccgaatgctgcattatggtggacgacagcgcggacaacctgcatcaggcaaaagcattgggcatgaaaaccgtccggttcggtgcaaaagtgcacgacctgccctttatcgatgcttccgtaagcgatatggcgcaactggctcggtatgcagaaactttgtcagaacaccgccaaaatcattacaatacccacacccccccgaaaatacgaaagaatgttatgcgtaaaaccttccttatcctgatgactgccgccgcccttttgtcgggctgcgcgtgggaaacttatcaagacggcaacggcaagaccgccgtccgtcaaaaatatcccgccggcacgcccgtttattaccaagacggcagctactcgaaaaatatgaactacaaccaataccgtcccgaacgccatgccgtgttacccaaccaaaccggcaacaacgccgacgaagagcatcgccaacactggcaaaagcccaaatttcaaaaccgataa

SEQ ID NO: 72273 - DNA, 283 bp, Neisseria meningitidis; identical to SEQ ID NO: 62222

SEQ ID NO: 72274 - DNA, 1302 bp, Neisseria meningitidis
atgtattgggaacgcggtctgcacatgtataaggcaagtgctgtcgtgccaacgggatatgtacgggttgggaataccgcgccgctggtcggcgaagacacgcaacggtatgcctctttttggggcgacggctacgacgtgtaccgtcagttgagatggcagcagatacccgaaaaacagagaaaggcattcaaaaaagccgccaaaagcaaaaagaccgtgatgtttgccggacgggaatacggcatatccaaacagaatttgagcgatgtttgggacgattttgaagacgcgatggaactgaaggcgtttccctgcctgtcttcgctgtttctgaccaaatggcataaaaatctatatgaatatctggaggaatatccgtttattacccgattgtgtctggaaaaccacggtcagaccgtgctggatttcagcaatacgcgcataaccgacctttctgtcgatatgaccggcgtggaatcgctttatctgaacgaaggcttggacagcctgaacctgaaaggcgaaatcaaggaaaactgcaaggtctataccgccgaaaagggcgcgggtctgattttggaagtgggcaaaagcgttcccaaagtgcggggtttggaaaacctgaccgccgtcaacgtcatgggcattgccgatttcgatatgcaaaacctgtcggaaacgtatcccaagctcaaaaccatacggctgtggggcaaaccgggcaatatcttcaatttttccgccgtatcgggatttgaggatttggaagtgttcactaccgtagatttgttcggtttcggcgcggacgacatccctcatcccgaccggctgccgaagctgcacaggctgtggatgagcagcctgcccgaagaggcggcgaaggcagtaaagaaactttataagaaacggaaggaagacgggctggatctgtggatagaaaaagcccgaaaacccgaatggctggcgcaaaatttcgacaaccccttccgcgattgggacggcgcggagcatatcccgaaaagccatgccaaaaaagcggcggagctgtaccggaaaacccgtgccggcgtggtcaaactgctcggcaatccgcctgaaaacataggagaggagctggcagaggcggtcaaagcctataccggaggtttcaacaaaatggacaaaaaactctttatcgacacggtagagcgggaagatattgccgaggcgttggaaacgatattggacctgataccggaggggtcttgtgctgacaaggaaaaactgtttgaaatatttgataaaaacaggaatttttaa

SEQ ID NO: 72275 - DNA, 267 bp, Neisseria meningitidis; identical to SEQ ID NO: 40064

SEQ ID NO: 72276 - DNA, 510 bp, Neisseria meningitidis; identical to SEQ ID NO: 60237

SEQ ID NO: 72277 - DNA, 3033 bp, Neisseria meningitidis
atgttttggatagttttgatcgttattttgttgcttgcgcttgccggcttgttttttgtccgcgcacaatccgaacgcgagtggatgcgcgaggtttctgcgtggcaggaaaagaaaggggaaaaacaggcggagctgcctgaaatcaaagacggtatgcccgattttcccgaacttgccctgatgcttttccatgccgtcaaaacggcagtgtattggctgtttgtcggtgtcgtccgtttctgccgaaactatctggcgcacgaatccgaaccggacaggcccgttccgcctgcttctgcaaaccgtgcggatgttccgaccgcatccgacggatattcagacagtggaaacgggacggaagaagcggaaacggaagaagcagaagctgcggaggaagaggctgccgatacggaagacattgcaactgccgtaatcgacaaccgccgcatcccattcgaccggagtattgctgaagggttgatgccgtctgaaagcgaaatttcgcccgtccgtccggtttttaaggaaatcactttggaagaagcaacgcgtgctttaaacagcgcggctttaagggaaacgaaaaaacgctatatcgatgcatttgagaaaaacgaaacagcggtccccaaagtccgcgtgtccgataccccgatggaagggctacagattatcggtttggacgaccctgtgcttcaacgcacgtattcccgtatgttcgatgcggacaaagaagcgttttccgagtctgcggattacggatttgagccgtattttgagaagcagcatccgtctgccttttctgcagtcaaagccgaaaatgcacggaatgcgccgttccgccgtcatgcagggcaggcggaggcaaaatccccggatgtttcccaaggacagtccgtttcagacggcacagccgtccgcgatgcctgccgccgcgtttccgtcaatttgaaagaaccgaacaaggcaacggtttctgcggaggcgcggatttcgcgcctgattccggaaagtcggacggttgtcgggaaacgggatgtcgaaatgccgtctgaaaccgaaaatgttttcacggaaaccgtttcgtctgtgggatacggcggtccggtttatgatgaagctgccgatatctatattgaagaacctgctgcgcccgatgcttgggtggtcgaaccacccgaagtgccgaaagttcccatgcccgcaatcgatattccgccgccgcctcccgtatcggaaatctacaaccgtacctatgagccgccgacaggattcgagcaggcgcaacgcagccgcattgctgaaaccgaccatcttgccgatgatgttttgaatggaggttggcaggaggaaaccgccgctattgcagatgacggcagtgaaggtgcggcagagcggtcaaacgggcaatatctgtcggaaaccgaagcgttcgggcatgacagtcaggcggtttgtccgtttgaaaatgtgccgtctgaacgcccgtcctgccgggtatcggatacggaagcggatgaaggggcgttcccatctgaagaaaccggtgcggtatccgaacacctgccgacaaccgacctgcttctgccgccgctgttcaatcccgaggcgacgcaaaccgaagaagaactgttggaaaacagcatcaccatcgaagaaaaattggcggagttcaaagtcaaggtcaaggttgtcgattcttattccggccccgtgattacgcgttatgaaatcgaacccgatgtcggcgtgcgcggcaattccgttctaaatctggaaaaagacttggcgcgttcgctcggcgtggcttccatccgcgttgtcgaaaccatcctcggcaaaacctgtatgggtttggaacttccgaacccgaaacgccaaatgatacgcctgagcgaaatcttcaattcgcccgagtttgccgaatccaaatccaagctgacgctcgcgctcggtcaggacatcaccggacagcccgtcgtaaccgacttgggcaaagcaccgcatttgctggttgccggcacgaccggttcgggcaaatcggtgggtgtcaacgcgatgattctgtctatgcttttcaaagccgcgccggaagacgtgcgtatgattatgatcgatccgaaaatgctggaattgagcatttacgaaggcatcccgcacctgctcgcccctgtcgttaccgatatgaagctggcggcaaacgcgctgaactggtgtgttaacgaaatggaaaaacgctaccgcctgatgagctttatgggcgtgcgcaatcttgcgggtttcaatcaaaaaatcgccgaagccgcagcaaggggggagaaaatcggcaacccgttcagcctcacgcccgacgatcccgaacctttggaaaaactgccgtttatcgtggtggtggtcgatgagtttgccgatttgatgatgacggcaggcaagaaaatcgaggaactgattgcccgcctcgcccaaaaagcccgcgcggcaggcatccatcttatccttgccacacaacgccccagcgtcgatgtcatcacgggtctgattaaggcgaacatcccgacgcgtatcgcgttccaagtgtccagcaaaatcgacagccgcacgattctcgaccaaatgggcgcggaaaacctgctcggtcagggcgatatgctgttcctgccgccgggtactgcctatccgcagcgcgttcacggcgcgtttgcctcggatgaagaggtgcaccgcgtggtcgaatatttgaaacagtttggcgagccggactatgttgacgatattttgagcggcggcggcagcgaagagctgcccggcatcgggcgcagcggcgacgacgaaaccgatccgatgtacgacgaggccgtatccgttgtcctgaaaacgcgcaaagccagcatttcgggcgtacagcgcgccttgcgtatcggctacaaccgcgccgcgcgtctgattgaccagatggaggcggaaggcattgtgtccgcaccggaacacaacggcaaccgtacgattctcgtccccttggacaatgcttga

SEQ ID NO: 72278 - DNA, 1646 bp, Neisseria meningitidis
atgaaaatatctgcatctgatattgcgaaattaggaattccgagcctaccaactgatagacaagggattgaataccatgccaagaaaaataattggcaacactgttttgagcaaaaaggaagaggccgtcctaaaaaactgtatgaaatcgcttccctccctgccgaaatccgagcagccatcatgaaacggcagtcggacgagctggcggagaagatgccgaaaatgctgccccaagtcagaccggggacggcgatgtcggctcaggcactggctgaagcggccaagctgttgaacgagaaacaacggtcggtggcggatgcgcgatgtgcggtggtggcggcggtattggggattaaatacgaatacgattgctctgccaaggctgcggtggctcagtttttgggcttgctggcagaaggtaaattggacgcggtcacgcttgggaacttggaaaaggccaatgaccgcagccggtcggcgaaggttggcgaacgtactttagacggctggatttctgcttatttgaaagcggaaaacgcgatagagcggttggttgctttggctccgaagacgacgaaggcggtcaagccgattgagagctacggttggttgccgatgtttatgcggtttcacaacatcccttcggctccgaaactggcgcacagctaccgccggtttgtgcagtgggcggaagcggaaaatatgccggtcaatgatgtgcctaatttgagtatggtgcggcgcgtttgggacaagctcccgctaattatgcaggagcgcggcaggaaaacgggggcggcttataaatcgctgctgccttatgtgaaacgtgattggggggctttgaagccgaacgatgtttggatcggcgacggccacagctttaaggcgaaggtggcacaccctgtacacggcaggccgtttaagccggaagtgacggtgattattgatggttgtacgcggtttgtggtcgggttttcggtttcgttggctgaaagttgtgtggcggtatcggatgctctgcgtatcggggtcaagcattttggtttgccgattatctattactcggataacggcggcggccaaaccggcaagacgatagaccatgaaatcacgggcattattcgccgaaggcttatcgggaaataaggctggaacaggacggtatcgcgccggatatgttgtcggcggaagagctggcgacgatgtttatgccgcaggaagtgcgaaaggtacagcgcggttggctggatttgttcagcaactcttatttctcaaccgagctggcggagtatcacaaagacgaggtacgggtcagctacgatttgagcgatgcgtcggcggtcaatgtgtttgatatggacggcaagtttattactaaggcgcaggccaacggcaatacccgcgaggctttcccgacagcgcgtatcgaccaactggcggaaaaacgccgaaaaggcaaaatcaagcgggcggaaaatgcaatcaagctcgcgaatgcggaagtcaatccggcactggaacaggcggcagcttgggacgagctgggacatttgggcggaaacgtcatcgaggcggagtatgcggtattgccgaaaacgggcacggacgacgggattttcttgtttgaggcggatatgtaa

SEQ ID NO: 72279 - DNA, 1252 bp, Neisseria meningitidis
atgtccgaacaacatatttcgacttggaaaagtaaaatcaacgcattgggaccggggattatgatggcttcggcggcggtcggcggttcgcacctgattgcctcgacgcaggcgggcgcgctttacggctggcagatcgcgctcatcatcatcctgaccaacctcttcaaatacccgtttttccgcttcagcgcgcattacacgctggacacgggcaagagcctgattgaaggttatgccgagaaaagccgcgtttatttgtgggtattcctgattttgtgcatcctctccgccacgattaacgcgggcgcggtcgccattgtaaccgccgccatcgtcaaaatggcgattccctcgctgatgtttgatgtcggcacggttgccgccttgattatggcatcctgcctgattattttggtgagcggacgttaccgcgctttggatcgcgtttccaaaatcatcatcgttactttgagtatcgccacgcttgccgccgccgggcatcgctatgtcgcgcggtatgcagatgcagcccgattttatcgagccgacaccgtggacgcttgccggtttgggcttcctgatcgcgctgatgggctggatgcccgcgccgattgaaatttccgccatcaattctttgtgggtaaccgaaaaacaacgcatcaatccttccgaataccgcgacgggatttttgatttcaacgtcggttatatcgccagtgcggttttggctttggttttccttgcactgggtgcgtttgtgcaatacggcaacggcgaagcagtgcagatggcgggcggcaaatatatcgggcaattgatcaatatgtacgccgttaccatcggcggctggtcgcgcccgctggtggcgtttatcgcttttgcctgtatgtacggcacgacgattaccgttgtggacggctatgcccgtgccattgccgaacccgtgcgcctgctgcgcggaaaagacaaaacgggcaacgccgaattctttgcctggaatatttgggtggcgggcagcggtttggcggtgattttttggtttgacggcgtaatggcgaatctgctcaaatttgcgatgattgccgcttttgtgtccgcccctgtgtttgcctggctgaattaccgtttggtcaaaggtgatgaaaaacacaaactcacatcaggtatgaatgcccttgcattggcaggcttgatttatctgaccggctttaccgttttgttcctattgaatttggcgggaatgttcaaa

SEQ ID NO: 72280 - DNA, 174 bp, Neisseria meningitidis; identical to SEQ ID NO: 40073

SEQ ID NO: 72281 - DNA, 294 bp, Neisseria meningitidis; identical to SEQ ID NO: 56168

SEQ ID NO: 72282 - DNA, 375 bp, Neisseria meningitidis; identical to SEQ ID NO: 40077

SEQ ID NO: 72283 - DNA, 210 bp, Neisseria meningitidis
ttgatatggcggcacccccccccgacaaaaaaaacaatccggaacgcatctgaccgttccggcttgttttcaggcgaatccgccgcatcagaacatactgcgcacgcccatattgacctgccaagtctggcgcatcgtgtgcatcgaagacctttgcgcctcaaaataaagctgccttccgttgtcggcattaccacgcaaaaaaaatga

SEQ ID NO: 72284 - DNA, 237 bp, Neisseria meningitidis; identical to SEQ ID NO: 62233

SEQ ID NO: 72285 - DNA, 237 bp, Neisseria meningitidis; identical to SEQ ID NO: 62233

SEQ ID NO: 72286 - DNA, 189 bp, Neisseria meningitidis; identical to SEQ ID NO: 44052

SEQ ID NO: 72287 - DNA, 198 bp, Neisseria meningitidis; identical to SEQ ID NO: 40083

SEQ ID NO: 72288 - DNA, 291 bp, Neisseria meningitidis
ttgaggcaggcatttcagacggcattccttaaatgcgtgtacctgtggtgtttcaaaaggtcgtctgaaagtgcagcttctgcgaagctaaagcgcggtatcaacgaagttaaaatttgcctgaaccttaaaggcagcctgcaccccaatcccctctcccgtgggagagggctaggacgaggctggcaaactgaaagtttgcttgggcggcattttcaatgtgcaggctgcttttatagtggattaacaaaaatcaggacaaggcgacgaagccgcagacagtacaaatag

SEQ ID NO: 72289 - DNA, 465 bp, Neisseria meningitidis; identical to SEQ ID NO: 62236

SEQ ID NO: 72290 - DNA, 513 bp, Neisseria meningitidis
atgcccgaccttcttacatatcaatattataatatgacacacataagctcgccccgtaacgaatttatacgcggcatcaaagaaagttcgcccatacttatcggacttctgccttgggcattaatactcggtatgcagggcggacaaaaaggcatgagctggctggaaatgttgttgatgaccagtatgaacttcgccggcggctccgagtttgccacggtcaacctgtgggcggaatctctgccgatactgcttatcgccaccgtaacctttatgattaattcgcggcatatcctgattggggcggcacttgccccgcacctgaaagaaataccgctgaaaaaagccgtgcccgcactgttttttatgtgtgatgaaagctgggcgatggcattctccgaaatccaaaaacggaaagcagccggtttgcccgcattcaatatgcctttttatagtggattaacaaaaaccagtacagcgttgcctcgccttagctcaaagagaacgattctc

SEQ ID NO: 72291 - DNA, 417 bp, Neisseria meningitidis; identical to SEQ ID NO: 46069

SEQ ID NO: 72292 - DNA, 261 bp, Neisseria meningitidis; identical to SEQ ID NO: 56176

SEQ ID NO: 72293 - DNA, 246 bp, Neisseria meningitidis
gttttgctgattttgttaatttttgagtataggaagtttctaatggcaaccggtatcgtaaaatggtttaacgacgctaaaggttttggtttcatcacgcctgatgaaggcggcgaagatttgttcgctcacttctcagcaatcaatatggaaggtttcaaaaccctgaaagaaggccaacgcgtctctttcgacgtaaccaccggccctaaaggcaaacaggccgccaacattcaggctgcttaa

SEQ ID NO: 72294 - DNA, 210 bp, Neisseria meningitidis; identical to SEQ ID NO: 56180

SEQ ID NO: 72295 - DNA, 204 bp, Neisseria meningitidis; identical to SEQ ID NO: 40089

SEQ ID NO: 72296 - DNA, 192 bp, Neisseria meningitidis; identical to SEQ ID NO: 70374

SEQ ID NO: 72297 - DNA, 807 bp, Neisseria meningitidis; identical to SEQ ID NO: 64266

SEQ ID NO: 72298 - DNA, 432 bp, Neisseria meningitidis
atgaaaaaacaaatcaccgcagccgtaatgatgctgtctatgattgcccccgcaatggcaaacggcttggacaatcagacatttgaaaaccaagtgttccacacgcgggcagatgcaccgatgcagttggcggagctttctcaaaaggagatgaaggagactgagggggagtggattcctaatgctgttggaggcattatgggaggagttggagggcatttcagctatatggctagtgctattgctagtggctcgtataatcgaaatgaacattggacagcaattggaggtggtgcgttaattggtgcgatgaaccctattaacggaggaagagcactgattaatggtatgcgaggtgtagcagtggggactgttgctggtggcataactggttatgcaggttctacgggtaagaacactgacattcgccgt

SEQ ID NO: 72299 - DNA, 303 bp, Neisseria meningitidis; identical to SEQ ID NO: 40093

SEQ ID NO: 72300 - DNA, 219 bp, Neisseria meningitidis; identical to SEQ ID NO: 44074

SEQ ID NO: 72301 - DNA, 216 bp, Neisseria meningitidis; identical to SEQ ID NO: 44075

SEQ ID NO: 72302 - DNA, 213 bp, Neisseria meningitidis; identical to SEQ ID NO: 62251

SEQ ID NO: 72303 - DNA, 183 bp, Neisseria meningitidis; identical to SEQ ID NO: 56199

SEQ ID NO: 72304 - DNA, 657 bp, Neisseria meningitidis; identical to SEQ ID NO: 56200

SEQ ID NO: 72305 - DNA, 780 bp, Neisseria meningitidis
atgaatcaaaagtatattttatctgcaaacaataatagtttgatagaagaaattcacaatacagtacagagtattgggtattgtattgttcgcggtcttaatctaaaccatcttgatgacagccggagaaacaagaaattatttgactttctatctcaattaggaatgctgacaaaccacaaagacgatggttttaaatctatatttttggatattaaatatcgcggcgatgactatgtaataaataatgatataactttctcggaagatgttggagaatgtccacttcatagtgattcatcttttagtgaaaacccggaaagttatttggttatgtatgtagtaaaatcagccaatgatggaggtaattccctatttttaagttcatcagatattgtcaatcagttatctaaaacagaaaccggtaaaaaacacttaaaaacattaacgggcaatttatatccatttaaaacaccagcatcatttgataaaaaacaaggtgtgagatggggtaatatcttatcggtcaatactcaaatgattagatttagaagggattgtatctataaaggtattgaagaaaatagaaataaagtatcaaaggaaatggtacttgcacttgattatcttgtaaatgttataaaaaatgcgagtgatattcaagaattttctgcacaagatgatgatttgattattattgacaatgtcaatggtttgcatgccggaactgattatacggataaaaacaggcattatattagagcaagaattactgtataa

SEQ ID NO: 72306 - DNA, 2121 bp, Neisseria meningitidis
atgggcaaagccaacgcctttaccgcgccgattaccgtcgtcaactacgacgaacaagccctcaacaacaccgaagcgcgtactttggtggatgccgtagcgaaaaaagacgcttccgtttggcagttcggcggagaaagcaacacgctgactggactgtatttcagaggttatcagcttgatgcgcgccaattcagcgtcaacggtttggcaggtatgtacggcacgcaaggcacggccagcgtgcaagtcggctccgcacaactgattaaaggcgcgtccaccgccgtaaacggcatgaaccctgaaggtgcggtatccggttccgtcaatatcgaaaccaaaaaagccgccgatgaaggcaaccgcaaaatcggtttgggccggtttagcaacaaccgcgcccaaggtacgttcgatttgggtcaacgcttcggcgaaaacaaagcattcggcgtacgcgccaacggcaaactgcgccacggcgacactccgcgccacggttacagcgaagacaacaaagaatttgcggtaaatgccgactatcgcggcgaaacactgcgcgtagcgttcgattccatctacgcaaaacgcaaaaccaacggcggtcgcgcgcgtatgcaggacattcaaaacgccggcggacgcttgtttggcgcgcccgatggtaaaaccaacctgctgccttcttggaactggcaaaataccgccggccaaaccaatatgcttacgtttgaatgggatgcgtttgataatgcacagattacaggcggtatcggctacaacaaggcacgctattacggcacgctgatttccccgaccgtatgtttgaatgctaccagcacttgtaccgatatgcaaaacacaaacgccagcggcaaagtaacggcacgcaactatgactacaataccggtactgcgcgcctgaccgaccaatacttccgcactttaagcatgaacctgtctgcgcgaggcgaatttgaaaccggcccggtaacacataactggagtacggctttcgaccgcgttatccgccagcggaaaaccataaacggcagcgggaacggcaacagcaagatagaagtgaaggcaaacgaaaatattgcgaatcaattggcatcgtttacagccgactatcccaattcttgggagaactctgccaacttggatgccaatatcaaagtcaacagcctggctttgtccgacaccttgggcttcgtggataacaaataccgcctgactttgggcggacgtttccaagcggttgaatacaccaataagaaaaaatcacagagcggcgatgccaaacgcttcagcccgatgctgatggcggcgtgggtgccgcaacctgatttggttgtgtacggcaactatatggaagacttggagcctgccgatatcaaaaccgatgattccggcgaaacgacaatggcgaaaccgcgtgtcagccgtcagtttgaagtgggcgtgcgtaaaaactggggcaatttcgtaaccacgttaaacgcgttccaaatcaaacgcccgggctactggcgcggtcatacaactaccaagacaacaaaaggggtaacaacaacgctgacctatggcaacaattccgatttcgcccgctataaggcgcaaggcggcgcggccggcgacgagcaaggtatggaacgcaatcgcggtattgagttcaacacctacgcgaacttgctcaacaatactttgcgtccgactttgggtctgatgtatctgcaatcgaccgtgaaagagtatccaaattcacgcgatatgctggttaacggcgtacaagtcgccaatccgcgcgtaattgccaaagcaggtttggaatgggatacaccgtttgccaaaggattgactttaaacggtaatgtttcgtatttcggcaagtcttaccaagacacgcaaaaacaatacgccttcccgtcctataccttgattgacgtaggcgcgcgctacaaaaccaagctcggcaaaaatactttgaccgtcagcagctcggtggaaaacctgttcaacaaaaactattggcaggtacagcgcggccaatacgaccgcagcttcgccgtcgtcggtatgccgcgcacttactggctgaaggcggaattggatttc

SEQ ID NO: 72307 - DNA, 717 bp, Neisseria meningitidis
atggatacttttttagataggctcaaatttctttggcctcatggggctaagccatctgacatctataacaaaatagaaatgtcggcttctggatttaatagagtttggaaagagggagctatcccaacagccgattacctagtaaaaattcaagaagttaccggttgtgatttaaactggctgctgaccggaaaaggcttgccgtatctcgataaagccaggccggaaaacgccggagcattctctgtaagtagaaattctgatggaatcaccgacactatgggcaatcctgtcgacctgtccgagtttgtattcgtgccgcgctacaacgtagccgcagcagcagggtatggcgcaccagtcttcggcgaagaacctttattctgcttggctttccggaaatattggattgacaactatgtgaccaaacagccggaaaaactgtctgtaattaccgttaaaggcgattcaatggagggcgtgctcaatcatggggattccattctcatcaaccacgccgaaactgacccgcgtgacggcctatatgtcttgcgtataggcaatgacctctttgtcaaacgtgtgcaacgtataccgggcaaactgcttgtaacgtctgaaaatccacgttacgcaccgtttgaaatagatttgagcaatgcccaagacgacatcgccatcataggccgtgttgagtggtatggccggagtattgat

SEQ ID NO: 72308 - DNA, 423 bp, Neisseria meningitidis
ttgataagaatgaaaacatcgacggtcgtttttggcggattttttatggcagacaacagggagcgaatccaaatccccgttttggaaaatcctggcattagggaaatcaatcactttttttccgtatcaaattttgagaaaaaagccggcgtccttgttttcagaattattcctgaacccaaatttggcaataccgaattaactatctattttgaagaaggatgttatttgccaatgattcaaacaattttagaagatggggatattgaagtcaaaaaccttaaaacagaaaattatagtggaaatacaatggaaatttggggagacttctaccctattgagcatatctctaaaaatatttctacaattcaaaatataatttctgaatttatgatacaaaaacaaacaccggcaccaataatt

SEQ ID NO: 72309 - DNA, 1230 bp, Neisseria meningitidis
atgccttctgctcattatcctgaaatgagcgaaaaactgatggcggttttgatggcgatgctggttacgctgatgccgttttccatcgatgcctacctgcccgcgattcccgaaatggcgcagtcgctgggtgcggatgtccaccgcatcgaacagagcctgagtttgtttatgttcggcacggcgttcggacaggtggtcggcggttcggtgtccgacatcaaagggcgcaaacccgtcgcgctgaccggactgaccgtctactgccttgccgttgccgccatcgtatttgcttcgagtgccgaacagctcctcaacctgcgcgtcgtgcaggcattcggtgcgggcatgactgtggtcatcgtcggcgcaatggtgcgcgattattattccggacgcaaagccgcccagatgtttgcccttatcggcatcattttgatggttgtgccgctggtcgcacccatggtcggcgcattgttgcagggcttgggtggctggcaggcgatttttgtttttctggcggcgtattcgctggtgctgctcggtttggtgcagcatttcctgcccaagcctgccgtcggcggcaaaatcggacgggacgtgttcgggctggtggcggggcggttcaagcgcgtattgaaaacccgtgccgcgatgggttatctgttttttcaggcattcagcttcggttcgatgttcgcctttctgaccgaatcttccttcgtgtaccagcagctctaccgtgttacgcctcatcaatacgcttgggcgtttgcactcaacatcatcacgatgatgtttttcaaccgcattaccgcgtggcggctcaaaaccggcgtgcatccgcaaagcatcctgctgtgggggattgtcgtccagtttgccgccaacctgtcccaactcgccgccgtgctgtttttcgggttgcccccgttttggctgctggtcgcgtgcgtgatgttttccgtcggtacgcagggcttggtcggtgcaaacacgcaggcgtgttttatgtcctatttcaaagaagagggcggcagcgcaaacgccgtattgggtgtattccaatctttaatcggcgcgggggtgggtatggcggcgaccttcttgcacgacggttcggcaaccgtgatggcggcaacgatgaccgcgtccacctcttgcggcattgcgcttctgtggctctgctcgcatcgtgcgtggaaagaaaacgggcaaagcgaatacctt

SEQ ID NO: 72310 - DNA, 288 bp, Neisseria meningitidis; identical to SEQ ID NO: 56206

SEQ ID NO: 72311 - DNA, 204 bp, Neisseria meningitidis; identical to SEQ ID NO: 40102

SEQ ID NO: 72312 - DNA, 213 bp, Neisseria meningitidis; identical to SEQ ID NO: 40104

SEQ ID NO: 72313 - DNA, 141 bp, Neisseria meningitidis
atgtgcgcggctattatggcatattttggcggctttgttcgcactttgttcgatcttggcgtgtttgaacgcggcggcgtgaaaggaagggggaaatggttttcccgcttttggcggcggtgtcggaggtgctgtgcctga

SEQ ID NO: 72314 - DNA, 1128 bp, Neisseria meningitidis
atgaaaatcgtttttatcacaacagtcgcatccagcatttacggtttccgcgcccccgtcattaaaaaattaatcggcaaaaaccatcaggtgtatgcctttgtatcggagttttccgataatgaattggatattatcagggaaatgggggttacacccgttacctaccgttcaaaccgcagcgggctgaacccgttttccgatataaaatccaccttcctcatctttaaagaactcaaaaaaatatcgccggatttggttttcccttatttcgcaaaacccgtgattttcggcacttttgccgcaaaactggcaggcgtgcccagaatcgtcgggatgctggaaggtttgggattcgcatttaccccgcagccggaaggcataccgttaaaaacaaaaatcataaaggggatcttgattgccttataccgcattgccctgccgatgttggaaagcctgattgtattaaaccccgacgacaaagacgaactgacggacaaatacggcatcaaaataaaaaacatccatattttgggcggaatcggtctggattcgcggcaatatccttattccgaggcggatattcccgatgaaaaagaacccgtaaaattcctctttatcggcagatttctgaaagaaaaggggattgatgattttattcgggcggcggaacaggttaaggacaaataccccgatacggtttttaccgctttgggcgcaatcgacaaatcacgcggggggggggatttggaacggcttgccgcccgcgatattatccgtttccccggttttgtgaacaatgtttccgaagtgataaaagaacatcatatattcgtattgccgtcttattatagggaaggcgttccccgaagcactcaggaggcaatggccgtcggcagggcagtgattacgacggatgtccccggatacagggaaacggtcgccgacaaggtcaacggcttcctgatcgaaccttggaatccccgcatcttggccgaaaaaatgatttattttatcgaaaacagggaagccgtccgcctgatggggaatgcaagttatgcgattgccaaagataaattcgatgccgaaaaagtcgatttgaaattgctcgatattttgaaggcgtaa

SEQ ID NO: 72315 - DNA, 1014 bp, Neisseria meningitidis
atgattttctccatcatcgtccctatttacaatgtggaaaaatacctccgctgctgcgtggattccgtgcttgccgaaaattttgccgattatgaaatgattttggtcgatgacggttcgccggacggctgcgggaagatttgcgacgaatatgcaggcaaatatccgcatataaaagtgattcatcaagaaaacggcgggctgtcggatgcccgcaacgccggtatccgggcggcaaaaggcgattacctaatctttttggacagcgacgattattgggccgataccaaccgttcaaaaaacgcggggggggggggattctttgatttacaacaacttgcagacaaaaaggttgatttgatcctgcatccctcgtccttcaattaccgcgacatccccaaaggggcggacttttcggataatgattttgtccgccattttgaaacgctggtggaggggcggtactatatcgccaacgcgtggacaaaaatcgtcaggcgggaaataatcatcaaaaacaatctgtttttcccaaaaggatacattcacgaggatttcccgtacagtttgcaattggcgcgttttatcaagacttttgccttttacgataaccctttttaccagtaccgcgttctcggcggctctatcagccacaacatcaaatacaaaaatttcagcgatgtgctgacgcatctcgaccggggtgtggattttttagtcgaaaacaaaaattcccccatctacggcggtttgcaaaaatttgtcttcgacaatatcggctatctgaggtctatattggtaaggctttatttttccaaaaacattatcctcatctaccggaaatatttttcatttaaagaaaaatgcagaaagatattcggcgcgaagacaatccgtccggtttttatcgggaagaccgcattcatcataggattgccgatattgcgcctgctcgtaccgcctatgctgtacccggcaatcaaggccgtttatcagaaatttttttcggaataa

SEQ ID NO: 72316 - DNA, 657 bp, Neisseria meningitidis
atgataaaaaatctttataaattgataaattatgcggctttgattggtttcgccccaaatatagtttttgcttggcctatgtttgttgaccccccgccttaccaaaacatccatgtacgaagttggaaagcacggcgagattccggcatagtaaaacaagatttggatttttcttgcggcgcggcttcgattgccacgttactgaataatttttatggcagacattattctgaagcggaaatcttggacaaaatggataaaacccaaatgcgtgcttcttttgatgatatgcaacgcataatgcccgaactgggttttgaagcacaaggttatgctttgccatttgaacagttggtacaactaaaaattcctgtaattgtgtatttaaaataccgtaaaaacaaccatttttcggtattgaacggtattaacggagaaactgttttgctgactgatccatcgctggggcacgtctcaatgagcaaatcacaattcttgagcgcatggaaaacacgtgatggcgaaatggaaggaaaaattttagccatcgtgccaaaaaatactgattttgttagaaatcagatgttttttaataagaatcccgttcgtcaaacacgttttacggtagaacaaatccaaatgcggcaaaaacgataa

SEQ ID NO: 72317 - DNA, 612 bp, Neisseria meningitidis; identical to SEQ ID NO: 48102

SEQ ID NO: 72318 - DNA, 1056 bp, Neisseria meningitidis
atggatttaagtatcgtagttcctatttataatgtcgaaagttatttggaagcgtgtttaagttccatagaatctatattaagtaatgaaaatgtcgaacttatccttgtgaatgacgggtcaaaagacggaagtgaagatatatgttataaatatatagataaaacaacaaacaacaaacaacaaacaacaaacaacaaacaacaaacaacaaacaacaaacaacaaacaacaaacaacaaacaacaccgataccgaacaccaaacatcaaatatatatatcaggataaccaaggattatcggaggcgagaaataccggaataaaaaattcaaacggaaaatatatagcatttattgattcggatgattttattaattgtcaggtcttgctggattttcttggtaaagatgatagtgatatgccggatgtggtttttttaaatgcggttaaatatgataagggaagtgtttcatattttggcgaagattatcagcctgaaaaaatactcaatcaatccaaagtcgaagttttgaaaggattatgccgatttagaaaatttccgggttcggcgtggaataagattataaaaagagaattgattattagagaaaaactgttttttgaaaggggaatttattctgaagatatcgaatggtcaatgaggttatttaatgcggcaacaactttttcttatttggacggttgttattactattatcggcagggaagaaaagattctattacgggaactgtttcggaaaaaagtataaagtcattattatatattttggagaaaaatgcggaaatggaatttaatagggatatatcgagttatctttattcttttctttcctacgaatatctcgttttgctttttatcatgacgagtaaaaatatagagtgtgatgctgatataaaaagaagggcgtatcatttaaggtttatgctgttaaagtctaataagttgatatataagctgatattcccgataatcacattattcggggttgatattacaggcaggattttaaaagcaatcagggggaatatttaa

SEQ ID NO: 72319 - DNA, 732 bp, Neisseria meningitidis; identical to SEQ ID NO: 56214

SEQ ID NO: 72320 - DNA, 1188 bp, Neisseria meningitidis
atggatatacaaagtaaagcgaaaaaattgattgagatgattcagacggcaccggtggagtggaagccgttgggggaagtggcaagtataggaaagggaaagcagcttaataaatcactacttagagaaaaagataagtatcccgtaatcaatggcggtattaatccatcaggttattggcatgaatacaataacgaagctggcacgattgttattagccaaggaggagcaagtgcggggtttgttaattggatggatatccctttttttgcaggagctcacgcatatactattaaagcgaacgaagacaaactattgcaacggtttgcatatttttttaaaaatgaagcaaattacattcatgcaatgtcaatacggagcagtataccagcacttgctaaaagtgaattgcaaaacttacttattcccatcccgcccctagaaacccaacaaaaaattgtaaaaatacttgacaaattcaccgagctggaagctacgctggaagctacgctggaagcggaattagccctgcgcaaacgccaataccggtattaccgcgactttcttttagattttgacaatcaaatcgggggggtagctgatggctatcaatgccgtctgaaagatgtggtttggaagacgttgggggagattgccgaatattcaaaaaaccgtatttgttcggataaactgaacgaacataattacgtgggcgtggataatctcttacaaaatagagaaggtaaaaagttatccggttatgttccaagtgagggaaaaatgacagaatatattgccaatgacatcttgattggaaatattcgtccgtatttgaaaaaaatctggcaggcagactgcacgggcggaacaaacggtgatgttttggttatccgggtaacagatgaaaaggttaatccaaaatatctgtatcaggtattggccgatgataaattttttgcctttaatatgaagcacgccaaaggtgcaaaaatgccgcgtggcagcaaagcagcgattatgcaatataaaatccccatcccaccactccccgaacaggaaaaaatcgtcgccatcctagacaaattcgacaccctgacccactccgtcagcgaaggcctgccgtacgaaatcgccctgcgccgcaaacaatacgaatattaccgcgaacagctgcttgcctttcggtag

SEQ ID NO: 72321 - DNA, 1164 bp, Neisseria meningitidis
atgaacatcaccatagtcgccccttattgctcgctgccgtccgaaccgtatttcaaccgcttttggtatctggcagaacgattgtcgcaatcgcacgacgtgttgctgattaccagccgtttccgccactacgacaaatcattcagacggcatgaagatgctgccgccacttcaaacggcaggctgcgcgtcaagctgctggacgaacctggctaccgaaaaaacgtctccctcgcccgcgtcgccagccaccgcgtattcgtccgcaatttggcacgctggctgcacagcccgcaggcggcggaacaggacatcgtctattctgcctatccgctgatggcgaccaacctgctgttgggcaaacacaaagcgcgtttgggctacaaactgattgtcgatgtgcaggacgtatggccggagtctttctcctcggtcgtaccatttttgaaaaaagtaccgcacaagctgctgccctttgcttcacgcgccaaccgtgcctaccgctgcgccgacgcgctggttgccgtatcgcagacttatctcgaccgcgccaaagaagccaatccgaacgtacccggcgaagccgtctatatcggtacggattttgccgccatcgcccccccgcgattccgctccaaaaccacccgccttttctacttgggaacgctcagttacagctacgacgtggaaaccgtgtgcaaaggtgttcggaaacttttagacgacggcgaaaacgtcgaattgcacatcatgggcggcggccccgacctagaaaagctgaaacagcatgaaaaccgcgccatcaagttttacggctacctcccctacgccgacatgatttccatcgccaaaggctgcgacatcgccgtcaacgccatccatagccacgccatgcaatcggttaccaacaaactttccgactatatggctttgcaaaaaccgattttaaacagtcagaccaatgccgaagtcctcggcctcttgaacctactaccgcacgaaaactaccgttccggcgacgtggacagcttcgttcaagccgccaaagatattttgaaacgcaaaaacgaccccgttcagtccgacgaaatcgtccgccgcttcaggcgcgacatttcctatcggaaaatcgtcaacctgattgaaagattagcccatgagtaa

SEQ ID NO: 72322 - DNA, 1848 bp, Neisseria meningitidis
atgcacgacacccgtaccatgatgattaaaccgaccgccctgctcctgccggctttatttttctttccgcacgcatacgcgcctgccgccgacctttccgaaaacaaggcggcgggtttcgcattgttcaaaaacaaaagccctgacaccgaatcagttaaattaaaacccaaattccccgtccgcatcgacacgcaggacagtgaaatcaaagatatggtcgaagaacacctgccgcttatcacgcagcagcaggaagaggttttggataaggaacagacaggcttcctcgccgaagaagcaccggacaacgttaaaacgatgctccgcagcaaaggctatttcagcagcaaagtcagtctgacggaaaaagacggagcttatacggtgcacatcacaccgggcccgcgcaccaaaatcgccaacgtcggcgtcgccatcctcggcgacatcctttcagacggcaacctcgccgaatactaccacaacgcgctggaaaactggcagcagccggtaggcagcgatttcgatcaggacagttgggaaaacagcaaaacttccgtcctcggcgcggtaacgcgcaaaggctacccgcttgccaagctcggcaacacccgggcggccgtcaaccccgataccgccaccgtcgatttgaacgtcgtcgtggacagcggccgccccatcgccttcggcgactttgaaatcaccggcacacagcgttaccccgaacaaatcgtctccggcctggcgcgcttccaaccgggcacgccctacgacctcgacctgctgctcgacttccaacaggcactcgaacaaaacgggcattattccggcgcgtccgtacaagccgacttcgaccgtctccaaggcgaccgcgtccccgtcaaagtcagcgtaaccgaggtcaaacgccacaagctcgaaaccggcatccgcctcgattcggaatacggtttgggcggcaaaatcgcctacgactattacaacctcttcaacaaaggctatatcggctcggtcgtctgggatatggacaaatacgaaaccacgcttgccgccggcatcagccagccgcgcaactatcggggcaactactggacaagcaacgtttcctacaaccgttcgaccacccaaaacctcgaaaaacgcgccttctccggcggcatctggtatgtgcgcgaccgcgcgggcatcgatgccaggctgggggcagagtttctcgcagaaggccggaaaattcccggctcggatatcgatttgggcaacagccacgccacgatgctgaccgcctcttggaaacgccagctgctcaacaacgtgctgcatcccgaaaacggccattacctcgacggcaaaatcggtacgactttgggcacattcctgtcctccaccgcgctgatccgcacctctgcccgcgcaggttatttcttcacgcccgaaaacaagaaactcggcacgttcatcatacgcggacaagcgggttacacccttgcccgcgacaatgccgatgtcccctcggggctgatgttccgcagcggtggcgcgtcttccgtgcgcggttacgaactcgacagcatcggacttgccggcccgaacggatcggtcctgcccgaacgcgccctcttggtgggcagcctggaataccaactgccgtttacgcgcaccctttccggcgcggtattccacgatatgggcgatgccgccgccaatttcaaacgtatgaagctgaaacacggttcgggactgggcgtgcgctggttcagcccgcttgcgccgttttccttcgacatcgcctacgggcacagcgataagaaaatccgctggcacatcagcttgggaacacgcttctaa

SEQ ID NO: 72323 - DNA, 471 bp, Neisseria meningitidis; identical to SEQ ID NO: 54820

SEQ ID NO: 72324 - DNA, 357 bp, Neisseria meningitidis; identical to SEQ ID NO: 46100

SEQ ID NO: 72325 - DNA, 195 bp, Neisseria meningitidis; identical to SEQ ID NO: 68278

SEQ ID NO: 72326 - DNA, 3114 bp, Neisseria meningitidis
aataaaacttggaaacggcaggttttccgccataccgcgctttataccgccatattgatgttttcccataccggcggggggggggcgatggcgcaaaccagtaaatacgctattatcatgaacgagggaaaccagctcgaggtaaaggggaatgggcaatattcaacaataaaggacaaagacagggagcgcgaatatactcatcagggcacaagaggaggaggaggaggctctgtctcattcaacaatagcgatgagcttgtttctcgacaaaacggtactgccgtttttggcacagccacctacctgccgccctacggcaaggtttccggttttgatgccggcgctctgaaagagcgcaacaatgccgtcgattggattcgtaccacccgcatcgcgctggcaggctacgcctacaccgacgccatatgcagaagcagcacaggctgtcccaaacttgtctataaaacccaatttaccttcggtaattccggtttggcaaaaaaggcaaacggcggcgagctggatatatacgtagacaaaagccgcgacaattcgcccatttacaaattgaaggatcatccatggttgggcgtgtctttcaatttgagcgccaagggtaccgccaaagatggtaagacaatcaacaaatttgatgaaaagaatagtaataacaacctcgtctataccacggaaggccgcgatatttccttgggcgactggcagcgcgaaaagaccgccatggcctattatctgaacgccaagctgcacctgctggataaaaaacagattcaaaatatcaccgacaaaacagtgcagttgggtgtcttgaagccgagcatcgatgtgcggcaaggaaataaggggattgccggcattctagcttattgggctaagtgggacattaaagatgacgggcagattccagtcaagctcggcctgcagcaagtcaaagcaggccgctgcatcaataaaccgaaccccaataaaaacagcaaagccctttcgccggccctgactgcccccgcgctgtggttcggacctgtgaaagatggtaaggcggagatgtattccgcttcggtttctacctaccccgacagttcgagcagccaaattttcctgcaaaacctttcccgcaaggatgacacaagcaaaccgggccgctattccctcaaacccttgagtgcgtcggatattcaaagtaaagagccgactttcacagggcggcaaaccgtcatccgattggatggcggcgtacagcagatcaaactggataaaagcaatgaggccgccggtttaaatggaaataccaacaacaacactttcggcattgttaaggacttgggcgtcgaacctgataccaatgagtggaaaaaagtattgctgccttggacggttcggggttttgctgatgacagtgaatttaaaaaattcaacaaagaagaaaaaaacaacgacaacaagccaaaatacagccaaaaataccgcatccgcgaaaacggcaacaatagcaagcgcgatttgggcgacatcgtcaacagccccatcgtggcggtcggcgggtatttggctacttccgccaacgacgggatggtgcatatcttcaaaaaaggcaacggggacgcgcgcgactatagtctgaagctcagctacatccccggcacgatgccgcgcaaggatattcaaagccaagactccaccctcgccaaagagctgcgcgcctttgccgaaaaaggctatgtgggcgaccgctacggcgtggacggcggctttgtcttgcgcaaagtcgaacggaacgggaaagaccatgtgtttatgttcggcgcgatgggctttggcggcagaggcgcgtatgccttggatttgaccaaaatcgacagcaataacctgaccggcgtttccatgtttgatgtccaaaacgacaaaaataacaataagaatgacaataatcgcgtggaattaggctacaccgtcggcacgccgcaaatcggcaaaacccacaacggcaaatacgccgccttcctcgcctctggttatgcgactaaagacgttaacagcaacgacaatacaaccgcgctgtatgtatatgatttggaaagcagcggcaatttgattaaaaaaatcgaagtgaaggacggcaagggcgggctttcgtcccccacgctggtggataaagatttggacggcattgtcgatatcgcctatgccggcgatcgcggcggcagtatgtaccgctttgatttgagcaacaacgatccgaccaaatggtctgtacgtactatttttaaaggcacgccggataagccgattacttccgcgcccgccatttcccaactgaaagacaaacgcgtggttatcttcggcacgggcagtgatttgagtgaggatgatgtgaatagccaagaaatccaacacgtttacggtatttttgacaatgacacaaacacaggtgtggcgaaagacgggcagggcaacgggctgctcgagcaagtgctggaaaaagacaaagacggcaaaacgctgttcttaagtgactacaaaaggtctaacggctcgggcgataagggctgggtagtgaaattggaagccggacagcgcgttaccgtcaaaccgaccgtggtattgcgtaccgcctttgtaaccatccataaatatacgggtaatgacaaatgcggcgcggaaaccgccattttgggcatcaataccgccgacggcggcaagctgaccaagaaaagcgcgcgcccgattgtgccggacgccaatcaggctgtcgcgcaatattccggtcataagaaaggcatcaacggcaaatccatccctataggttgtatgcaaaaaggcaatgaaatcgtctgcccgaacggatatgtttacgacaaaccggttaatgtgcgttatctggatgaaaagaaaacagacggattttcaacaacggcagacggcgatgcgggcggcagcggtatagaccccgccggcaagcgttccggcaaaaacaaccgctgcttctcccaaaaaggggtgcgcaccctgctgatgaacgatttggacagcttggacattaccggcccgacgtgcggtatgaaacgaatcagctggcgtgaaatcttctactga

SEQ ID NO: 72327 - DNA, 729 bp, Neisseria meningitidis
atggcttcgcataatactacacatcagatgaaaacgctgtgttcttcctgttctttgcgggaactctggcctgtcgggctgctgcccaacgagctcagccaactcgatgccgtcatccgtcaaagccgccggaaaaagggcgaatacctgttctgtgtcggcgaagcctttacctcgctctttgccatccgttcgggcttcttcaaaacaaccgtcgccagtcaggacggccgcgatcaggtaacgggtttctttatgtcgggcgaactcatcggcatggacggcatctgttcccatgtgcacagttgcgacgcggtcgccttggaagacagcgaagtgtgcgaactgccgtttacccacatcgaagaactggggcaaaacatccccagcctgcgtacgcacttcttccgcatgatgagccgtgaaatcgtgcgcgaccaaggtgttatgctgctgttgggcaatatgcgcgccgaagagcggattgccgccttcctgctgaacctttcccaacgcctttattcccgaggttttgctgccaacgacttcatcttaagaatgtcccgcgaagaaatcggcagttatctcgggctgaaacttgaaaccgtcagccgcacattatctaaatttcatcaggaaggattgatttccgtcgagcataagcacatcaaaatcctcaatctgcaggtgttgaaaaaaatggtgtccggctgctcgcacgccatttga

SEQ ID NO: 72328 - DNA, 1665 bp, Neisseria meningitidis
  misc_feature 68, 69, 70, 71, 72, 97, 98, 99, 100, 101: 'n' is a, c, g or t
atgcagttatcaggcgcgcaaatcatagtgcagagtctcaaagccgaaggtgtcgagtacgttttcgnnnnncacacacttaaaattaagtgtgtgnnnnncgcggcagatgcgtatgcgcgcgtcagcggtaaggtgggcgtggcattggttacatccggcccgggcgttaccaatgcactgaccggtattgctactgcctatacggattcgattccgatggtggtcatcagcgggcaggtaggcaattccctgattggtacggatgcgttccaagaagttgatacggtgggtattacccgtccgtgcgtcaaacacaatttcctggttacggatatcaatgagttggcggaaaccattaaaaaggcgttccaaattgccgcaagcggccgaccagggcctgtggtggttgatgtcccgaaagatgttacgcaggcgatggcgaaattcagctatcctcaggaagacatttttatccgttcgtatcaaccggttgttcaagggcatatcggtcagattaaaaaggccgtgcagatgttggcatctgccaaacgtccggtcgtctattttggcggcggcgtggtgttgggtaatgcttctgaagagctgacccgatttgtccgaatgacgggtgctccgtgcacgggtacgctgatgggcttgggcgcttatccttccggcgaccgccaattcctcggtatgctcggtatgcacggtacttacgaggcaaaccttgccatgcagaatgcggatgtcgttcttgccgtaggtgcgcgttttgacgaccgtgtggtttccgtaccgtccaaatttttcgagaaggcgaagaaggttatccatatcgatgtcgatccttccagcatcgccaaacgcgtgaaggcggacattccgattgtcggcgacgtgaaaaatgttttgtccgagatggttgcgctgtggcaaaaacaagagtccgtgccgtctgaagatgctttgggcaaatggtggaaaaccatagaggaatggcgttcccgagattgcttgtggtttgacaacggcagcgaaattatcaagccacaatatgtgattcagaagcttgccgagattaccggcaattcggcaatcatcacatcggatgtagggcagcatcaaatgtttgcggctcaatattatcccttcgaacgtccgcgccaatggctcaactccggcggtttgggtacgatgggcgtgggtctgccttatgcgattggtgcaaaacttgccgccccggatcaagacgtattctgtattaccggcgacggctcgattcagatgaacatccaagagttgtccacctgtttccaatatcggattccggttaacgtcattacgctgaacaacggttatctcggtatggtacgccagtggcaggaaatatattacggcggccgagagtcggaaacttatttcgattctttgcccgatttcgtcaaacttgccgaggcatacggccatatcggtatccgcgtggacaagaagtctgatgtggaaggtgcgttgttggaagcattgaaccaaaaagacaggctggtgtttatcgacttcctgaccgaccagaaacagaatgtgatgcccatggtcggcaacggcaaaggtttggacgaaatggtacttccgccgcatatgcgtgcggacgaaaaggcgtaa

SEQ ID NO: 72329 - DNA, 501 bp, Neisseria meningitidis
atgtcagaccctaatttgataccggaaattttcgccgccgaagggcagaatctgcaaggcagttttctgctggaagaattggatgaacgcgtcagttcgcacgattatcccgccgacaggcagaccaaaatatcgtttacactgaccggcggtcgcgaccggctgcaacgcctgttcctcgacctgaacgtcaaagccgatatgcccctgatttgccagagatgtatcaaacccatgccgttcatgcttgatgaaagcagccgtatcgtcctgttttccaacgaagagtccttggacgaatccatgcttgccgacgaagaactcgaaggcatactgattgaaaaagaactcgacgtgcgcacattggtagaagaccaaatcctgatgtccctgcccttttcgccgcgacacgaagactgcggcgacaatgggacactggaagaagtcaatcgggacaaacccaacccctttgctgttttggcaggtttgaaaagcaattga

SEQ ID NO: 72330 - DNA, 510 bp, Neisseria meningitidis
atgattgccgctccggcgatggcaaacagcatggacaatcagacatttgaaaaccaagtattccatacgcgggcagatgcgccgatgcagttggcggaactttctcaaaaggagatgaaggagactgagggggcgtttcttccattggctatcttgggtggtgctgccattggtatgtggacacagcatggttttagttatgcaacgacaggcagaccagcttctgttagagatgttgctattgctggcggattaggcgcaattcctggtggtgtaggtgccgcaggaaaggttgtttcctttgctaaatatggacgtgagattaaaatcggcaataatatgcggatagcccctttcggtaatagaacaggtcatcctattggaaaatttccccattatcatcgtcgagttacggataatacgggcaagactttgcctggacagggaattggtcgtcatcgcccttgggaatcaaaatctacggacagatcatggaaaaaccgcttctaa

SEQ ID NO: 72331 - DNA, 1323 bp, Neisseria meningitidis
atgaaaaaatacctattccgcgccgccctgtacggcatcgccgccgccatcctcgccgcctgccaaagcaagagcatccaaacctttccgcaacccgacacatccgtcatcaacggcccggaccggccggtcggcatccccgaccccgccggaacgacggtcggcggcggcggggccgtctataccgttgtaccgcacctgtccctgccccactgggcggcgcaggatttcgccaaaagcctgcaatccttccgcctcggctgcgccaatttgaaaaaccgccaaggctggcaggatgtgtgcgcccaagcctttcaaacccccgtccattcctttcaggcaaaacagttttttgaacgctatttcacgccgtggcaggttgcaggcaacggaagccttgccggtacggttaccggctattacgaaccggtgctgaagggcgacgacaggcggacggcacaagcccgcttcccgatttacggtattcccgacgattttatctccgtccccctgcctgccggtttgcggagcggaaaagcccttgtccgcatcacgcagacgggaaacagcggcacaatcgacaataccggcggcacacataccgccgacctctcccgattccccatcaccgcgcgcacaacggcaatcaaaggcaggttgaaggaagccgcttcctccccttaccacacgcgcaaccaaatcaacggcggcgcgcttgacggcaaagccccgatactcggttacgccgaagaccctgtcgaacttttttttatgcacatccaaggctcgggccgtctgaaaaccccgtccggcaaatacatccgcatcggctatgccgacaaaaacgagcatccgtatgtttccatcggaaaatacatggcggataagggctacctcaaactcggacaaacctccatgcagggcattaagtcttatatgcggcaaaatccgcaacgcctcgccgaagttttgggtcaaaaccccagctatatctttttccgcgagcttgccggaagcagcaatgacggtcccgtcggcgcactgggcacgccgttgatgggggaatatgccggcgcagtcgaccggcactacattaccttgggcgcgcccttatttgtcgccaccgcccatccggttacccgcaaagccctcaaccgcctgattatggcgcaggataccggcagcgcgattaaaggcgcggtgcgcgtggattatttttggggatacggcgacgaagccggcgaacttgccggcaaacagaaaaccacgggttacgtctggcagctcctacccaacggtatgaagcccgaataccgcccgtaa

SEQ ID NO: 72332 - DNA, 660 bp, Neisseria meningitidis
atgatacacgccgtactcttcgacctcgacggcacacttgccgacaccgccctcgacctcggaggcgcactcaacaccctgctcgctcgccacggactacctgcaaaaagcatggacgagatccgcacccaagccagccacggcgcggcaggactgatcaaactcggcgcaggcatcacccccgaccacccctatgcccgatggcgcaccgaatatctggaggaatacgaccgccgctacgcccaagacaccgagctctttgacggcgtgaacgaactcattgccgaactcaaccaacgcggcatcaaatggggcatcatcaccaacaaacccatgcgcttcaccgacaaactcgtccccaaactcggcttcatcatcccacccgccgtcgtcgtcagcggcgacacctgcggcgaacccaagcccagcatcaaacccatgctgtatgcgtgcggacaaatccacgccgacccgcaacacacactctacgtcggtgatgccgaacgcgacatccaagcaggccgcaacgccggcatgaaaaccgtcctcgccgaatggggctacatctcagatgaagacgataccgactcatggcaggcggatttccacatccgaacgccgctcgatctgctcgaatgtctggacaaaatacagccctga

SEQ ID NO: 72333 - DNA, 1248 bp, Neisseria meningitidis
atgttttctctagaggcttggataggcttgaggtatctcagggcgaaaaagcgcaacggctttatgtcgtttatcacgatggtttcgattgccggaatcgccttgggcgtaaccgcgctgattgtcgtcttgtcggttatgaacggctttcagaaagaaatacgcgggcagctcctgaatgtcgcgccgcacgccgaaatcggctatatcgacaatacggatacggattggcgcaacctgcttcggtttaccgaaaaccgcaaaggtattttggctgccgcgccctatgtttccaatcaggcattgctggccaatgcgggcgaaatcaggggcgtgcagatgcgcggcattttgccgtctgaagagcgcaaagtggtggaatacggcgacaaaatgccggcaggcaaatttgaagacctgattccgggcgagtttgacattatcctcggtgtcggcttggcggaggctttgggggcggaagtcggcaataaagttaccgtcatcacgccggagggcaacgttacccctgccggagtcgtgccgcgcctgaagcagtttaccgtggtcggtctggttaagacgggcgtttacgaagtggacaactcattggcgatgacgcatatccaagacgcgcgcgtactgtaccgcttggataaggaagttgcggggctgcggctgaaactcgccgacccgcaaaacgcccccgccttgacggcaacactgattccggaggcgcaaagggatacggtttgggtgcgcgattggacgttcagcaatcgaagctattttgaggcggtcgagttggaaaaacggatgatgttcatcatcctgacgctgattatcgccgtggcggcgttcaaccttgtctcttccttggtgatggcggttacggaaaagcaggcggacattgcgattttgcggactttgggtctttcccctgccggcgtgatgaagatttttatggtgcagggcgcgttttcaggctttttcggcacgctggcgggtgtggtctgcggcgtgcttttgggttggaacgtcggcagggtcgtggcattttttgaaaacctactcggtgtccaccttatcaattcgcaggtttattttatcgactacctgcccagcgatgttgatatgggcgacgttgccctgattgcctgcatttctttgggactgtctttcgttgccacgctctacccgagccggcgcgcgtcaaaaacccaaccggcggaggctttgcgttatgagtga

SEQ ID NO: 72334 - DNA, 579 bp, Neisseria meningitidis
atgaacaatatgtttgccgcaaaattgtccaaactggtttataccgcttccgaccatcccgacccctgtcgaaaatggggggagtttgaccgcctgattttgctgatacgcaagctgtatcaaatattggacggcaacataccctccagagtaacggtttgcttcactaccgaagcagcgcggctgatgctggataaagcggctgccggttgcgatgcggcaatgttgcgcgcccaacgttggcgcatctacacgcagattgcggaacgccttgccgggtcggacggcggcttcacggttacggcagaaagcgtgtccgccgcctgcccggagcttgaaggacgctatctcgagcttgtccgccgcgccgccgtctctttcggtttcacgcaaggatgggaaaatccggcaggcgggcaggaaaaaacacaagccgtcccggatgccgcatcgggtcattccgtcagaaaaccaatcaaaatcaatatagaagcgaaagtggaatgctatccggcataccgcccgaccgccgccttgaaagtaacccgccggcggtttttccggctgcgaaaccggtga

SEQ ID NO: 72335 - DNA, 2040 bp, Neisseria meningitidis
atgatgtcgcccgaaacccagaaacagctcaaaatcaccgatgtttccgccaagaagctcgacaaactcaacctccataccgcgtgggatttggtgttgcacctgccgctgcgttacgaggacgagacgcacattatgccgattaaggacgcgccgattggcgtgccgtgccaggtcgagggcgaggttatccatcaggaagtaacgttcaaaccgcgcaagcagttgattgtccaaatcgccgacggttccggcagcgtcctttttctgcgcttcatccacttttacgccagccatcagaaacagacggcggtcggcaaacgcatccgcgccgtgggcgaaatcaaacacggcttttacggcgacgagatgattcatcccaaaatccgcgatgccgagggcggcggtttggcggaaagcctcacgccggtttacccgaccgtaaacggtttgaaccagcccactttgcgccgtattattcagacggcgttggacgttacgccgctgcacgacacgctgcccgatgccctgctgtgccgtctgaagctgccacacctcgccgaaagcctgcgtcttttgcattcgccgccgccgagtttcacgattcatcagctttcagacggcacgctgcctgcatggcaacggctcaaattcgatgaacttttggcgcaacagctttcgatgcgcttggcgcgacagaagcgtatcggcggcacggcggcggcattgggcggcgacggcacattgacccaagccctgcgccaagccctgccgtttgccctgaccgatgcgcaagaaaaagttgtttccgaaatctgccgcgatatggcgcaaacctacccgatgcaccgcctgctgcaggatgtcggcagcggcaaaaccattgtcgccgccttgtccgcgctgaccgccatcgaatccggtgcgcaggtggctgtaatggcgcccactgaaatccttgccgaacaacattttattaaatttaaacaatggctcgaacctttgggcattgaagttgtccgcctttttggcagtttgcgtaaaaaagccaaagacgaagccaaagccaaactcgccgacggcagcgtcaaaatcgccatcggcacgcacgccctgttttcagacggcgtgacgtttcacaatttgggcctgaccatcgtggacgaacagcaccgtttcggcgttgcccaacgcctcgcccttaaaaacaaagggcgcgaagtccatcagttgatgatgtccgccacgcccatcccgcgcacgcttgcgatgagttttttcgccgatttggacgtgtccgtcatcgacaaactgccgcccgggcgcaccccgattaaaacgcgcctcgtcaacaacgtccgccgcgccgaagtcgaaggcttcgtcctcaatacttgccgaaaagggcggcaggcgtattgggtctgcccattgattgaagaaagcgaaaccctgcaactgcaaaccgccgccgaaaccctcgcccggcttcagacggcattgcccgagctgaatatcggactggtacacgggcgcatgaaggccgccgaaaaggccgaagtgatggcacggttttcttcgggggagctgaacgtcttggtcgccaccaccgttatcgaagtcggcgtagatgtgcccaatgccgccctgatggtcatcgaacacgccgagcgcatgggcttggcgcagctgcaccaattacgcggtcgggtcgggcgcggcgcggcagaaagcgtgtgcgtcctcctgtttgccgaacccttgggcgaactcgccaaagcgcggctgaaagtcatctacgaacacaccgacggctttgaaatcgcccgccaagacctcaacatccgcggccccggcgaatttctcggcgcgcgtcaaagcggcgtgcctatgctgcgtttcgccaagctcgaagaagacttacaccttttggaacaagcgcgcgaaatcgccccgatactgattgaacaaaaccccgaaatcgtcgaagcgcatttggcacgatggctttccggcagggaaggttatttgggcgtgtga

SEQ ID NO: 72336 - DNA, 1125 bp, Neisseria meningitidis
atgagcaactggaaacccgatattccctataacgatttaccacccctgccgccaaaacaggatattgaaagcaaaaccatcctgaaacgttgtatagccgcccgtgcatcccttgcccgtttaaagcagccagaactgataccgaatcaagccatgctgattaacacccttcctgttatggaagcccgtgcaagttcagaaattgaaaacatcgtaaccacaacggataagctgtttcaatccctgcaaatggatacggaacggcaagaccctgccacgaaagaagccctgcaataccgcaccgccctgtttgcaggctatgaatcactgacgagccgccctttatgcacacaaaccgccatcatggtctgcaacgccatcaagcacccctacgaaatggccatccgcaaaacaggcggcacagccctaaaaggaggcaacagcggaaatgttgtctataccccgcccgaaggagaagaaaccatacgcggcaagctggcaaattgggagcggtttattcacgaaagcggcgatttagacccgcttatcatcatggcggcggcacattaccaatttgaagccatccatccgtttacggacggcaacgggcggacggggcgcatattgaacagcctgctattgattgaaaaagggcttttggatttgcctattttgtatttgagccgctacatcatcgaaaacagggcggactattaccgcctgcttttaggcgtaaccgaacggcaggattgggaaagctggataatctacatcttagacggcgtagccgacaccgccgattggacggtatcgaaaatagatgcgatacgccgcctgttcgagcagacacgtcaacacatacggacacacgcacaaggaatctacacgcacgaactggtaaatcttctgtttgagcagccatatacacgcattgccaacctagaagcggcagggatagccaaacggcagacggcctctaagtacctgaaagagctttcagacataggtgtgctgcaagaaatcgccattggcagggacaaactattcattcatccgcgcctaatggaactattgcggggagagggcaacagctttacctcattccaatccctcgttaaagcatag

SEQ ID NO: 72337 - DNA, 5976 bp, Neisseria meningitidis
atgaataaaggtttacatcgcattatctttagtaaaaagcacagcaccatggttgcagtagccgaaactgccaacagccagggcaaaggtaaacaggcaggcagttcggtttctgtttcactgaaaacttcaggcgacctttgcggcaaactcaaaaccacccttaaaaccttggtctgctctttggtttccctgagtatggtattgcctgcccatgcccaaattaccaccgacaaatcagcacctaaaaaccagcaggtcgttatccttaaaaccaacactggtgcccccttggtgaatatccaaactccgaatggacgcggattgagccacaaccgctatacgcagtttgatgttgacaacaaaggggcagtgttaaacaacgaccgtaacaataatccgtttctggtcaaaggcagtgcgcaattgattttgaacgaggtacgcggtacggctagcaaactcaacggcatcgttaccgtaggcggtcaaaaggccgacgtgattattgccaaccccaacggcattaccgttaatggcggcggctttaaaaatgtcggtcggggcatcttaactatcggtgcgccccaaatcggcaaagacggtgcactgacaggatttgatgtgcgtcaaggcacattgaccgtaggagcagcaggttggaatgataaaggcggagccgactacaccggggtacttgctcgtgcagttgctttgcaggggaaattacagggtaaaaacctggcggtttctaccggtcctcagaaagtagattacgccagcggcgaaatcagtgcaggtacggcagcgggtacgaaaccgactattgcccttgatactgccgcactgggcggtatgtacgccgacagcatcacactgattgccaatgaaaaaggcgtaggcgtcaaaaatgccggcacactcgaagcggccaagcaattgattgtgacttcgtcaggccgcattgaaaacagcggccgcatcgccaccactgccgacggcaccgaagcttcaccgacttatctctccatcgaaaccaccgaaaaaggagcggcaggcacatttatctccaatggtggtcggatcgagagcaaaggcttattggttattgagacgggagaagatatcagcttgcgtaacggagccgtggtgcagaataacggcagtcgcccagctaccacggtattaaatgctggtcataatttggtgattgagagtaaaactaatgtgaacaatgccaaaggctcggctaatctgtcggccggcggtcgtactacgatcaatgatgctactattcaagcgggcagttccgtgtacagctccaccaaaggcgatactgaattgggtgaaaatacccgtattattgctgaaaacgtaaccgtattatctaacggtagtattggcagtgctgctgtaattgaggctaaagacactgcacacattgaatcgggcaaaccgctttctttagaaacctcgaccgttgcctccaacatccgtttgaacaacggtaacattaaaggcggaaagcagcttgctttactggcagacgataacattactgccaaaactaccaatctgaatactcccggcaatctgtatgttcatacaggtaaagatctgaatttgaatgttgataaagatttgtctgccgccagcatccatttgaaatcggataacgctgcccatattaccggcaccagtaaaaccctcactgcctcaaaagacatgggtgtggaggcaggcttgctgaatgttaccaataccaatctgcgtaccaactcgggtaatctgcacattcaggcagccaaaggcaatattcagcttcgcaataccaagctgaacgcagcccaggctctcgaaaccaccgcattgcaggcaaatcgtttcagacgccttcatgctgtttctgcagacggtcatgtatccttattggccaacggtaatgccgactttaccggtcacaataccctgacagccaaggccgatgtcaatgcaggatcggttggtaaaggccgtctgaaagcagacaataccaatatcacttcatcttcaggagatattacgttggttgccggcaacggtattcagcttggtgacggaaaacaacgcaattcaatcaacggaaaacacatcagcatcaaaaacaacggtggtaatgccgacttaaaaaaccttaacgtccatgccaaaagcggggcattgaacattcattccgaccgggcattgagcatagaaaataccaagctggagtctacccataatacgcatcttaatgcacaacacgagcgggtaacgctcaaccaagtagatgcctacgcacaccgtcatctaagcattaccggcagccagatttggcaaaacgacaaactgccttctgccaacaagctggtggctaacggtgtattggcactcaatgcgcgctattcccaaattgccgacaacaccacgctgagagcgggtgcaatcaaccttactgccggtaccgccctagtcaagcgcggcaacatcaattggagtaccgtttcgaccaagactttggaagataatgccgaattaaaaccattggccggacggctgaatattgaagcaggtagcggcacattaaccatcgaacctgccaaccgcatcagtgcgcataccgacctgagcatcaaaacaggcggaaaattgctgttgtctgcaaaaggaggaaatgcaggtgcgcctagtgctcaagtttcctcattggaagcaaaaggcaatatccgtctggttacaggagaaacagatttaagaggttctaaaattacagccggtaaaaacttggttgtcgccaccaccaaaggcaagttgaatatcgaagccgtaaacaactcattcagcaattattttcctacacaaaaagcggctgaactcaaccaaaaatccaaagaattggaacagcagattgcgcagttgaaaaaaagctcgcctaaaagcaagctgattccaaccctgcaagaagaacgcgaccgtctcgctttctatattcaagccatcaacaaggaagttaaaggtaaaaaacccaaaggcaaagaatatctgcaagccaagctttctgcacaaaatattgacttgatttccgcacaaggcatcgaaatcagcggttccgatattaccgcttccaaaaaactgaaccttcacgccgcaggcgtattgccaaaggcagcagattcagaggcggctgctattctgattgacggcataaccgaccaatatgaaattggcaagcccacctacaagagtcactacgacaaagctgctctgaacaagccttcacgtttgaccggacgtacgggggtaagtattcatgcagctgcggcactcgatgatgcacgtattattatcggtgcatccgaaatcaaagctccctcaggcagcatagacatcaaagcccatagtgatattgtactggaggctggacaaaacgatgcctataccttcttaaaaaccaaaggtaaaagcggcaaaatcatcagaaaaaccaagtttaccagcacccgcgaccacctgattatgccagcccccgtcgagctgaccgccaacggtatcacgcttcaggcaggcggcaacatcgaagctaataccacccgcttcaatgcccctgcaggtaaagttaccctggttgcgggtgaagagctgcaactgctggcagaagaaggcatccacaagcacgagttggatgtccaaaaaagccgccgctttatcggcatcaaggtaggtaagagcaattacagtaaaaacgaactgaacgaaaccaaattgcctgtccgcgtcgtcgcccaaactgcagccacccgttcaggctgggataccgtgctcgaaggtaccgaattcaaaaccacgctggccggtgccgacattcaggcaggtgtaggcgaaaaagcccgtgtcgatgcgaaaattatcctcaaaggcattgtgaaccgtatccagtcggaagaaaaattagaaaccaactcaaccgtatggcagaaacaggccggacgcggcagcactatcgaaacgctaaaactgcccagcttcgaaagccctactccgcccaaattgtccgcacccggcggctatatcgtcgacattccgaaaggcaatctgaaaaccgaaatcgaaaagctggccaaacagcccgaatacgcctacctgaaacagcttcagacggccaagaacgtcgattggaaacaggtgcagctggcctacgacaaatgggactataaacaggaaggcttgaccggagccggtgcagcgattgtggtgattattgtaaccgctctaacttatggatacggagcggctgcagcgggtagcgtaactgccgcaggaagtagtacagccgcagctgcaacaacgacagcggcagcaactaccactgtttctactgcagctgccatgcaaaccgcagctttagcctccttgtatagccaagcagctgtagccatcatcaataataaaggcgatgtaggcaaagcattaaaagatctcggcaccagtgatacggtcaagcagattgttacttccgcactgacggcgggtgcattaaaccagatgggagcagatattgcccaattgaacagcaaggtaagaaccgaactgttcagcagtacgggcaatcaaaccattgccaaccttggaggcagattggccaccaacctcagcaatgcaggtatctcagctggtatcaataccgccgttaacggcggcagcttgaaagacaacttaggcaatgccgcattgggagcattggttaatagcttccaaggggaagccgccagcaaaatcaaaacaaccttcagcgacgattatgttgccaaacagttcgcccacgctttggcgggttgtgttagcggactggtacagggaaaatgtaaagatggggcaattggcgcagcagttggggaaatcgtagctgaatccatacttggcggcagaaaccctgctacactcagcgatgcagaaaagcataaagttatcagttactcgaagattattgcgggcagcgtggcggcactcaacggcggcgatgtgaatactgcggcgaatgcggctgaggtagctgtggtgaataatgctttgaattttgacagcacccctaccaatgcgaaaaagcatcaaccgcagaagcccgacaaaaccgcactggaaaaaatcatccaaagtattatgcctgcacatgcggcaggtgcgatgactaatccgcaggataaggatgctgccatttggataagcaatatccgtaatggcatcacaggcccgattgtgattaccagctatggggtttatgctgcaggttggacagctccgctgatcggtacagcgggtaaattagctatcagcacctgcatggctaatccttctggttgtactgtcatggtcactcaggctgccgaagcgggcgcgggaatcgccacgggtgcggtaacggtaggcaacgcttgggaagcgcctgtgggggcgttgtcgaaagcgaaggcggccaagcaagctgctcctaaagaaacaataaacaatttggcaaatttagccaaagcagaacagcagattttattccgtattgcccaacgcgatacgcaactggatgcatggaagacgggatttaacaatagagtaaggaaaggagcaggcttgcttgatgcaagtaatattccgataaccattaacggaaaaaccatcaaacctgtacaagccataagcttaaagggagcacccgtttacagcggcgtaagcgaacaggagatttttgcgctttatcggcagatgactggccagaatccgaattttagagttttgcctgacggaagattagcaaatggcattatcagtactggagaatgggcaggaacaaaaattgcattaagaaatttttcaaaaacagagaattcaactcaagcacgatggacattagatttgcagaatcctccatcatttattaaaggtactaaattggagcttaaattccaataa

SEQ ID NO: 72338 - DNA, 1215 bp, Neisseria meningitidis
atggagattattttaggtatcgtgatgtttaccgtcatcgttttggctttggcactgatgattctgtttgccaaatccaagctggtcagcgaaggcgacatcaccatcaaagtcaacggcgaaaaagagctgacgatgcccgccggcggcaaactcttgggcgcgcttgccaacgaaggcatctttatcccctccgcctgcggcgggggcggttcgtgcggtcagtgccgcgtcgtcgtaaaaagcggcggcggcgacatcctgccgaccgagctgtcccacatcaacaaacgcgaagcgcgcgaaggctgccggctgtcgtgccaagtcaacgtcaaaaccgatatggagattgaagtccccgaagaagtgttcggtgtgaaaaaatgggaatgcaccgtcatctccaacgacaacaaggccacgttcattaaagaactcaagcttgccattcccgaaggcgaagaagtgcccttccgcgccggcggctacatccaaatcgaagccccgccgcacaccgttgcctacaaagacttcgacattcccgagaaataccacgaagactgggacaaatacaatctgtggcaatacgtttccaaagtggacgaaccgattttgcgcgcctactctatggcttcgtatcctgaggaaaaaggcatcattatgctgaacgtgcgtatcgccacgccgcctccgcgcgtacccgatgcgcctccgggacaaatgtcgtcctacatctggtcgctcaagcccggcgacaaagttacgatttccggcccgttcggcgaattcttcgccaaagacaccgatgccgaaatggtcatcggcggcggcgcaggtatggcgccgatgcgttcccacattttcgaccagttgaaacgtttgaactccaaacgcaaaatcaccttctggtacggcgcgcgttccaaacgcgagatgttctatgtcgaagacttcgaccgactcgcggcagagtttccgaacttcacgtggcacgtcgccctgtccgacccgttgcccaaagacaactgggacggctacacaggcttcatccacaacgtggtttacgaaaaccacctgaaaaaccacgaagcaccggaagactgcgaattttatatgtgcggccctccgattatgaaccagtccgtcatcaaaatgctcaaagacttgggcgtggaagacgaaaacatcctcttggacgatttcggcggttaa

SEQ ID NO: 72339 - DNA, 696 bp, Neisseria meningitidis
atgacggaacctgcggccgaaggcggtaaagctgccaaggcgttaaaaaaatatctgattacgggcattttggtctggctgccgattgcggtaacggtttgggtggtttcctatatcgtttccgcgtccgatcagctcgtcaacctgctgccgaagcaatggcggccgcaatatgttttggggtttaatatcccggggctgggcgttatcgttgccattgctgtgtttgtaaccggattatttgccgcaaacgtattggccgcagattcttgcgcgtgggacagcttgttggggcggattccggttgtgaagtccatctattcgagtgtgaaaaaagtatccgaatcgctgctgtccgacagcagccgttcgtttaaaacaccagtactcgtgccgtttccccaatcgggtatttggacaatcgcattcgtgtccggtcaggtgtcgaatgcggttaaggccgcattgccgaaggacggcgattatctttccgtgtatgttccgaccacgccgaatccgaccggcggttactatattatggtaaagaaaagcgatgtgcgcgaactcgatatgagcgtggacgaagcgttgaaatatgtgatttcgctgggtatggtcatccctgacgacctgcccgtcaaaacattggcaggacctatgccgcctgaaaaggcggatttgcccgaacaacaataa

SEQ ID NO: 72340 - DNA, 1041 bp, Neisseria meningitidis; identical to SEQ ID NO: 46051

SEQ ID NO: 72341 - DNA, 450 bp, Neisseria meningitidis
atgcaaattattctgttagaaaaaatcggcggtttgggcaacttgggcgacatcgtaaccgttaaaaacggctatgcccgcaacttcttgattcctgctggtaaggcaaaacgtgctactgaagcaaacatgaaagagtttgaagcacgccgtgccgaattggaagccaaacaggccgaaattttggcagatgcccaagcccgtcaggaaaaattggatggccaaaccattaccgttgcacaaaacggtgtggacggtcgtctgtttggttccgttaccaatgctgatattgcggctgcaatcgttgcgactggcatcgaagccgtgaaagcaaatgtacgtctgccgaacggtcctctgaaagccgttggcgagtacgaagtggaagtggctttgcacactgatgccgttgctaaaattaccgttgccgtcgttgccgcaaccgagtaa

SEQ ID NO: 72342 - DNA, 999 bp, Neisseria meningitidis
atgctcgccgaagaagttttcggtttcggtatctacaaagagtccaaaggctcgggcggccgtttttatgagcgctgttggttgatgggttcggaagacgtcctatacggtcgcgtccattttggcggacaaaacaataccattcttttcgaactgaccggcaccggttgcggcgtcgcaaaagaaggctgggaatcacgacttttcgcattcctgactaatgcaatccgcccaaaaatcacacgcgttgacatcgcaaaagactttttcaacggcgaatacagcccgaaccaagcccgtgaagaccgaaataaaggtatgtttacctgtcatcacgtcaaaccaaaaggcgaatgtttggggtcagattgggaagaagacgatgaagccaaaatgaccaaaggcaagacctatggtatcggctcccgtgaatcgtccaaatatgtccgcgtctatgaaaaaggcaagcagttgggcgataaaacaagcacatggacgcgctttgaaattgaattcaaagcaaaagacatcgttatcccttttgaagttttgcagaatccgggcgaatatttcggcggcgcatatccgatttgcgaacgattcgtccaaaaggcaacgcgcatacacgcggttaaggaagataaggtcatttcagccgaccgttaccttgaatgggaaaaacagttcggacgtgcggcaaacggtctgaaattcatttttcccgaattggacaaagccaaactgtttgaactgattgagccgagtcatcacaagctgcccaagtctttggctcccgaagcctacgactgcgcctttttgaaagctcaagccattcatgaacagcccgcattcaaaccgtacaatgacccttactatatgtacgaatattacgagaatcttgaaaaacagcttgaacagcaaaaacacgtcaacaatgaagaaagctataacaacttcatttacgacaaattcgcaagactaccgatttcatgggcttaa

SEQ ID NO: 72343 - DNA, 999 bp, Neisseria meningitidis
atgctcgccgaagaagttttcggtttcggtatctacaaagagtccaaaggctcgggcggccgtttttatgagcgctgttggttgatgggttcggaagacgtcctatacggtcgcgtccattttggcggacaaaacaataccattcttttcgaactgaccggcaccggttgcggcgtcgcaaaagaaggctgggaatcacgacttttcgcattcctgactaatgcaatccgcccaaaaatcacacgcgttgacatcgcaaaagactttttcaacggcgaatacagcccgaaccaagcccgtgaagaccgaaataaaggtatgtttacctgtcatcacgtcaaaccaaaaggcgaatgtttggggtcagattgggaagaagacgatgaagccaaaatgaccaaaggcaagacctatggtatcggctcccgtgaatcgtccaaatatgtccgcgtctatgaaaaaggcaagcagttgggcgataaaacaagcacatggacgcgctttgaaattgaattcaaagcaaaagacatcgttatcccttttgaagttttgcagaatccgggcgaatatttcggcggcgcatatccgatttgcgaacgattcgtccaaaaggcaacgcgcatacacgcggttaaggaagataaggtcatttcagccgaccgttaccttgaatgtaaaaaacagttcggacgtgcggcaaacggtctgaaattcatttttcccgaattggacaaagccaaactgtttgaactgattgagccgagtcatcacaagctgcccaagtctttggctcccgaagcctacgactgcgcctttttgaaagctcaagccattcatgaacagcccgcattcaaaccgtacaatgacccttactatatgtacgaatattacgagaatcttgaaaaacagcttgaacagcaaaaacacgtcaacaatgaagaaagctataacaacttcatttacgacaaattcgcaagactaccgatttcatgggcttaa

SEQ ID NO: 72344 - DNA, 819 bp, Neisseria meningitidis
atgagcagtccgcgccatgtgttttacatttccgaccgtaccggtctgactgccgagaatatcggcgaggctttgctgaaccagtttggcaatctgtcgttcaaacgccatacgcatccgtttgtcgatacgccggaaaaggcgcgcgcggtggtggagaaggtcaatcggagccggcaggaaaacggtcagcgtccgattgcgtttgtcagtgtggttgatgacgaaatccgtcggattatcaaaggggcggatgcttttcagattaatttctttgagacttttttgggactgttggagaaagaactcaataccgaagccacggcatccgagcaggggcatcacagtatcggtaatacgaagcgttacgatgcgcgtatggaggcggtaaatttctcattgaaccacgatgacggggtcagcgataagaaccttcaggaagcggatgtaatcttgatgggtgtatcgcgttcgggcaaaacgccgacctgcctttacctcgccctgcaatacggcatccgtgcggcaaactatccgctgattcacgatttggaatcggccgatctgccgcgtatggtcaagccttatagggataagctgttcgggttgaccatccagccggaacgtttgcaggccatccgccaagagcgccgcccgaattcaacttatgccaaaatcgatacatgccgcagcgaggtggcagacgcgcagagtatgttcagacggcatgggattccgtttgcgaatacgacggataaatcagtggaagagcttgccgtacacatccttcaggcgtgcaagctcaaacgcaggttttga

SEQ ID NO: 72345 - DNA, 4191 bp, Neisseria meningitidis
  misc_feature 4168, 4169, 4170, 4171, 4172: 'n' is a, c, g or t
atgaataaaggtttacatcgcattatctttagtaaaaagcacagcaccatggttgcagtagccgaaactgccaacagccagggcaaaggtaaacaggcaggcagttcggtttctgtttcactgaaaacttcaggcgacctttgcggcaaactcaaaaccacccttaaaaccttggtctgctctttggtttccctgagtatggtattgcctgcccatgcccaaattaccaccgacaaatcagcacctaaaaaccagcaggtcgttatccttaaaaccaacactggtgcccccttggtgaatatccaaactccgaatggacgcggattgagccacaaccgctatacgcagtttgatgttgacaacaaaggggcagtgttaaacaacgaccgtaacaataatccgtttctggtcaaaggcagtgcgcaattgattttgaacgaggtacgcggtacggctagcaaactcaacggcatcgttaccgtaggcggtcaaaaggccgacgtgattattgccaaccccaacggcattaccgttaatggcggcggctttaaaaatgtcggtcggggcatcttaactatcggtgcgccccaaatcggcaaagacggtgcactgacaggatttgatgtgcgtcaaggcacattgaccgtaggagcagcaggttggaatgataaaggcggagccgactacaccggggtacttgctcgtgcagttgctttgcaggggaaattacagggtaaaaacctggcggtttctaccggtcctcagaaagtagattacgccagcggcgaaatcagtgcaggtacggcagcgggtacgaaaccgactattgcccttgatactgccgcactgggcggtatgtacgccgacagcatcacactgattgccaatgaaaaaggcgtaggcgtcaaaaatgccggcacactcgaagcggccaagcaattgattgtgacttcgtcaggccgcattgaaaacagcggccgcatcgccaccactgccgacggcaccgaagcttcaccgacttatctctccatcgaaaccaccgaaaaaggagcggcaggcacatttatctccaatggtggtcggatcgagagcaaaggcttattggttattgagacgggagaagatatcagcttgcgtaacggagccgtggtgcagaataacggcagtcgcccagctaccacggtattaaatgctggtcataatttggtgattgagagtaaaactaatgtgaacaatgccaaaggctcggctaatctgtcggccggcggtcgtactacgatcaatgatgctactattcaagcgggcagttccgtgtacagctccaccaaaggcgatactgaattgggtgaaaatacccgtattattgctgaaaacgtaaccgtattatctaacggtagtattggcagtgctgctgtaattgaggctaaagacactgcacacattgaatcgggcaaaccgctttctttagaaacctcgaccgttgcctccaacatccgtttgaacaacggtaacattaaaggcggaaagcagcttgctttactggcagacgataacattactgccaaaactaccaatctgaatactcccggcaatctgtatgttcatacaggtaaagatctgaatttgaatgttgataaagatttgtctgccgccagcatccatttgaaatcggataacgctgcccatattaccggcaccagtaaaaccctcactgcctcaaaagacatgggtgtggaggcaggcttgctgaatgttaccaataccaatctgcgtaccaactcgggtaatctgcacattcaggcagccaaaggcaatattcagcttcgcaataccaagctgaacgcagccaaggctctcgaaaccaccgcattgcagggcaatatcgtttcagacggccttcatgctgtttctgcagacggtcatgtatccttattggccaacggtaatgccgactttaccggtcacaataccctgacagccaaggccgatgtcaatgcaggatcggttggtaaaggccgtctgaaagcagacaataccaatatcacttcatcttcaggagatattacgttggttgccggcaacggtattcagcttggtgacggaaaacaacgcaattcaatcaacggaaaacacatcagcatcaaaaacaacggtggtaatgccgacttaaaaaaccttaacgtccatgccaaaagcggggcattgaacattcattccgaccgggcattgagcatagaaaataccaagctggagtctacccataatacgcatcttaatgcacaacacgagcgggtaacgctcaaccaagtagatgcctacgcacaccgtcatctaagcattaccggcagccagatttggcaaaacgacaaactgccttctgccaacaagctggtggctaacggtgtattggcactcaatgcgcgctattcccaaattgccgacaacaccacgctgagagcgggtgcaatcaaccttactgccggtaccgccctagtcaagcgcggcaacatcaattggagtaccgtttcgaccaagactttggaagataatgccgaattaaaaccattggccggacggctgaatattgaagcaggtagcggcacattaaccatcgaacctgccaaccgcatcagtgcgcataccgacctgagcatcaaaacaggcggaaaattgctgttgtctgcaaaaggaggaaatgcaggtgcgcctagtgctcaagtttcctcattggaagcaaaaggcaatatccgtctggttacaggagaaacagatttaagaggttctaaaattacagccggtaaaaacttggttgtcgccaccaccaaaggcaagttgaatatcgaagccgtaaacaactcattcagcaattattttcctacacaaaaagcggctgaactcaaccaaaaatccaaagaattggaacagcagattgcgcagttgaaaaaaagctcgcctaaaagcaagctgattccaaccctgcaagaagaacgcgaccgtctcgctttctatattcaagccatcaacaaggaagttaaaggtaaaaaacccaaaggcaaagaatatctgcaagccaagctttctgcacaaaatattgacttgatttccgcacaaggcatcgaaatcagcggttccgatattaccgcttccaaaaaactgaaccttcacgccgcaggcgtattgccaaaggcagcagattcagaggcggctgctattctgattgacggcataaccgaccaatatgaaattggcaagcccaacaagagtcactacgacaaagctgctctgaacaagctttcacgtttgaccggacgtacgggggtaagtattcatgcagctgcggcactcgatgatgcacgtattattatcggtgcatccgaaatcaaagctccctcaggcagcatagacatcaaagcccatagtgatattgtactggaggctggacaaaacgatgcctataccttcttaaaaaccaaaggtaaaagcggcaaaatcatcagaaaaaccaagtttaccagcacccgcgaccacctgattatgccagcccccgtcgagctgaccgccaacggtatcacgcttcaggcaggcggcaacatcgaagctaataccacccgcttcaatgcccctgcaggtaaagttaccctggttgcgggtgaagagctgcaactgctggcagaagaaggcatccacaagcacgagttggatgtccaaaaaagccgccgctttatcggcatcaaggtaggtaagagcaattacagtaaaaacgaactgaacgaaaccaaattgcctgtccgcgtcgtcgcccaaactgcagccacccgttcaggctgggataccgtgctcgaaggtaccgaattcaaaaccacgctggccggtgccgacattcaggcaggtgtaggcgaaaaagcccgtgtcgatgcgaaaattatcctcaaaggcattgtgaaccgtatccagtcggaagaaaaattagaaaccaactcaaccgtatggcagaaacaggccggacgcggcagcactatcgaaacgctaaaactgcccagcttcgaaagccctactccgcccaaattgtccgcacccggcggctatatcgtcgacattccgaaaggcaatctgaaaaccgaaatcgaaaagctgtccaaacagcccgagtatgcctacctgaaacagnnnnncacacacttaattaattaa

SEQ ID NO: 72346 - DNA, 2040 bp, Neisseria meningitidis
atgaaactcgaagcaagcaagcaagcaagcaagcagcaaaagtttaaaaaatcatttattgtaagtctatttttttctattctttatacctctccgcttttggctgttgattacgtttacgacaattctaaattaacaaatgagcaaattgaacgcttaaaaaaacttcgcgatagagatagtgaatattggaaagaagaaacttatcttataaccgaggataatccaaaagttccaccctttcccgcactataccctagaacataccaattcgaaaacatcaataactcaaaaaagatttctttttatgatcaaaaatataccgaaggttacctagttggcttcgcccgaggtttaggggttgcaaaaagaaatggggacacagaagaacaaatacggaaatattttaaggaatgttttaattctaacactaagatacgtgattatagtacttgccaagctgaaaaatttggatcccatcctcttatagtaaaaagtcatatattctccttaggtccaaaaataaaaaatagtcatatcaacagcgaaattttatctgtcgggaattatacagaatgggctaatcaagtaattcatcatattgaaaattatgtttcttttgcagcacatctatattctggtttagatccattccactatattgaggttacagacaactcgcacgttatcgggcaaacgattagtttggatgaattccgcttagaaaattctctctgggagccccgttgggattctaatgttgggaaattaaaaacaacgaatgcagacatccgttttaatactaaaagtgaaagtttactcgtaaaagaagattatgctggcggagctcgttttcgttttgcttacgatcctaaagaagcgaaaaatactgcattaatttttgagaaaaatgttactggcacttccgacatcatcttcgaaaatccaatagacgatttaaaaagcctcgatgggcatcaaattatcaaagtaaatggcacagcagataaacacgcattccgtctttctggcaaacaccaaaagggaatttatacgctttctttacaacaacgcccagagggcttttttaccaaagtgcaagaacgcgatgatattgcgatttatgcacaacaggctcaagccgccaatactttattcaacctacgtttgaataacaaaaacaacgatattttcgaccgcactttaccacgcaaaggcttgtggttgcgtgtgattgacggacattccaaccaatgggtgcaaggcaaaacagcacctgtagaaagctatcgaaaaggtgtgcaactcggcggcgaagtattcacatggcaaaacgaaagtaatcaactttctattggcttaatgggcggacaagcagaacaacgcagtactttccgcaacccagatacagacaatcttacaacgggaaatgtgaaaggctttggtgcaggcgtttacgccacttggcatcaacttcaggacaaacagacaggtgcgtatgcggatagctgggtacaatatcaacgtttccgccatagcattaacactgaagatgctacagaacgctttacttcaaaaggtatcactgcctcaattgaagcgggttacaatgctttattggcagaacacttcactgaaaaaggcaaccgtgttcgtttttacctgcaaccacaggcacaattgacttatttgggggtaaacggaaaattcagcgatagcgaaaatgcccaagtgaatttgcttggcttccgccaattacaaagccgagtgggcgttcaagctaaagctcaatttgctttcactaatggcgtcactttccaaccatttgttgctgtcaattcaatctaccaacaaaaacctttcggtctggaaatggacggagagcgtcgagtgataaacaataagacggcaattgagagccaattaggtgtagcagtgaaaatcaaatctcacttaactttacaagcaacattcaaccgccaaacaggcaaacatcatcaggctaaacaaggtgcgttgaatttacagtggacgttttaa

SEQ ID NO: 72347 - DNA, 2073 bp, Neisseria meningitidis
atgacactgaaagcaagcaagcaagcaagcaagcaagcaagcaagcaagcaagcaagcagcaagcaagcggtcgggttaatctattaacattatctgttttatcgctgttttgcacgccatatgtttgaggttcggatgcgtacgatcccgtcaaagaagccgagattaaaaacaaatttattttagaagcggcggaagacagaaattcccacgtttggcgcggcccgtgcagtgtgtcttttgattgcttcggtgctttcagttatcagcccggttcggatactcgttctacaaatattggcgatgctgccgatttttcattttcagacaagccggcaaacggcgtttcccattatttttccagcggtaaaaccgatccaaattcatctgaagccttgtatgacgaaatcaatatcacgggtaaaaactacaatagcggcatcctcgccgtcgataatatgcccgttgttaagaaatatgttacagagaattacggagctgatttaaagcaggcggttaaggatcaattaaaggatttatataaaacaagacccgaagattgggaaaaaaataaaaaaatagttgaggaagcgataataaaacaatatggaatacctagaaataaaattaataaatttagaaaagttattgatccaattatagaagaagctgtactcactcctcatagtaatacaacaccgaccaatctcgacaacatcttcaataaaaaattacacgtcaaaatcgaaaacaaatcccacgtcgctggacaggtgttggaactgaccaagatgacgctgaaagattccctttgggaaccgcgccgccattccgacatccatacgctggaaacttccgataatgcccgcatccgcctgaacacgaaagatgaaaaactgaccgtccataaggattatgcgggcggcgcggatttcctgttcggctacgacgtgcgggagtcggacgaacccgccctgacctttgaagacaaagtcagcggacaatccggcgtggttttggaacgccggccggaaaatctgaaaacgctcgacgggcgcaaactgattgcggcaaaaacggcggattccggttcgtttgcgtttaaacaaaattaccggcagggactgtacgaattattgctcaagcaatgcgaaggcggattttgcttgggcgtgcagcgtttggctatccccgaggcggaagcggttttatatgcccaacaggcttatgcggcaaatactttgtttgggctgcgtgccgccgacaggggcgacgacgtgtatgccgccgatccgtcccgtcaaaatatacggggtggcgcggctgcggacgggcggcgcaaaggcgtgcaaatcggcggcgaggtgtttgtacggcaaaatgaaggcagccggctggcaatcggcgtgatgggcggcagggtcggccagcacgcatcagttaacagcaaaggcggtgcggcaggcagtgatttgcatggttatggcgggggtgtttatgctgcgtggcatcagttgcgcgataaacaaacgggtgcgtatttggacggctggttgcaataccaacgtttcaaacaccgcatcaatgatgaaaaccgtgcggaacgctacaaaaccaaaggttggacggcttctgtcgaaggcggctacaacacgcttgtggcggaaggagttgtcggaaaaggcaataatgtgcggttttacctgcaaccgcaggcgcagtttacctacttgggcgtaaacggcggctttaccgacagcgaggggacgggggtcggactgctcggcagcggtcagtggcaaagccgcgccggcattcgggcaaaaaaccgttttgctttgcgtaatggtgtcaatcttcagccttttgccgcttttaatgttttgcacaggtcaaaatctttcggcgtggaaatggacggcgaaaaacagacgctggcaggcaggacggcgctcgaagggcggttcggcattgaagccggttggaaaggccatatgtccgcacgcatcggatacggcaaaaggacggacggcgacaaagaagccgcattgtcgctcaaatggctgttttga

SEQ ID NO: 72348 - DNA, 1644 bp, Neisseria meningitidis; identical to SEQ ID NO: 71507

SEQ ID NO: 72349 - DNA, 798 bp, Neisseria meningitidis
atgcaggcatttcaaatttccccagctgttgctactagggattttgcgctatattgctctagtttttcgaaaaatctccgttttgataccaaaagtaaattttacctctctactgaagactttgaacctcaattcccccattcatttgaaaatgcaattaaaattcttaatggcagtttaatatttgatattgattcccaacatcaacctcttcttccgtttgatttacctcctgttttaataaatcctgatgtcttaatcttttctaaaatatcgaaagcattatccttaaaaaaacctctaaaaatctcatatcattcaatttcatctggattatctgagaaagttattgtgcctcttgctctagttaatgacggatttcgatggcatttacgggcattcgatagaacaaaaaaccgatttgcagattttgtcctaacacgaataattcaagcaaatattttattagctgaaaatattgaagaaaatgaaacgattaacaatgatattgattggaatagaattgttaaaatcgagttggttccccatcctaatcatgatgaagctaaaaaagtgattgaaatggactttggaatgacaaatggaaaattagaattggcgcttagagcttcaaatatcggatatgttttacagcaatggcgagtcgattgttcgtcagatcatcatatcgatgatcctgcttttagattatggctgttagataatttagttttatacggcatcaacaatgctgaacacttagcgcctgcctttgataaaaaacgtagcaagccgtag

SEQ ID NO: 72350 - DNA, 1266 bp, Neisseria meningitidis
atgttcagcttcttccgtcgcaagaaaaaacaggaaacgccggctctcgaggaggctcaaattcaggaaaccgcagcaaaagcagagtccgaaaccgatcaagtaattgaaaatattaaagaagatgctgaatctttagcagaaagcgtcaaagggcaggtcgaatctgccgttgaaaccgtcagcggtgcggttgaacaagtaaaggaaaccgttgccgagatgctgtctgaagcagaggaagcggcggaaaaagcagcggaacaagtcgaagcggcaaaagaagccgttgccgaaaccgtcggcgaggctgtcgggcaagttcaagaagccgttgcgacaactgaagaacacaagctcggttgggcggcgcgtttgaaacaaggtttgaccaaatcgcgcgacaaaatggcgaaatcgctggcgggcgtgttcggcggcgggcaaatcgacgaagatttgtacgaagagctggaaaccgtgctgattaccagcgatatgggcatggaagccaccgaatacctgatgaaagacgtgcgcaatcgcgtcagcctcaaagggctgaaagacggcaacgaattgcgcggcgcgttgaaagaagccttgtacgacctgattaagcctctggagaaaccattggtcttgcccgaaaccaaagagccgtttgtcatcatgcttgccggcatcaacggcgcgggcaaaaccacgtctatcggcaaactcgccaaatatttccaagcgcagggcaaatccgtattgctggcggcaggcgacactttccgcgccgccgcccgtgagcagcttcaggcatggggcgaacgcaacaacgttaccgtgatttcgcaaaccacgggcgattccgccgccgtgtgcttcgatgccgtccaagccgccaaagcgcgcggcatcgacatcgtgcttgccgacaccgccggccgcctgcccacgcagcttcatttgatggaagaaatcaaaaaagtgaaacgcgtgctgcaaaaagccatgcccgacgcgccgcacgaaatcatcgtcgtgcttgatgccaatatcggtcaaaacgccgtcaaccaagtcaaagcctttgacgacgcattagggctgaccggtttaatcgtgaccaaactcgacggcacggcaaaaggcggcatcctcgccgcgcttgcctccgaccgccccgtccccgtccgctatatcggcgtgggcgaaggcatagacgacctgcgcccgtttgacgcgcgcgcgtttgtggacgcactgctggattga

SEQ ID NO: 72351 - DNA, 843 bp, Neisseria meningitidis
  misc_feature 824, 825, 826, 827, 828: 'n' is a, c, g or t
ttgtctgaaaatccgagctgtaaggtttcggcatctcaaacgtctaatcatgcaaaccgtccacacaggaaactcaaaatgaaacaccgtactttcttttccctttgcgccaagttcggctgcctgcttgcgctgggtgcttgttcgcccaaaatcgtcgatgccggagccgcgaccgtgccgcacactttatccactttgaaaactgcggacaaccgccccgccagtgtttacttgaaaaaagacaaaccgacgctgattaaattttgggcgagctggtgtcctttgtgtctgtccgaattgggacagaccgaaaaatgggcgcaagatgcaaaattcagctccgccaacctgattaccgtcgcgtctccgggctttttgcacgagaaaaaagacggcgacttccaaaaatggtatgccggtttgaattatcccaagctgcccgtcgtaaccgacaacggcggcacgatcgcccaaagcctgaatatcagcgtttacccttcgtgggcgttaatcggtaaaaacggcgacgtgcagcgcatcgtcaaaggcagcatcaacgaagcgcaggcgttggcgttaatccgcgacccgaatgccgatttgggcagcttgaaacattcgttctacaaacccgacactcagaaaaaggattcaaaaatcatgaacacgcgcaccatctacctcgccggcggctgcttctggggcttggaagcctatttccaacgcatcgacgcgtggttgacgcggtatcccggctacgccaacggcaacacgaaaaatccgagctatgaagacgtgtcctaccgccatacgggccacgnnnnncacacacttaattaa

SEQ ID NO: 72352 - DNA, 3186 bp, Neisseria meningitidis
  misc_feature 3171, 3172, 3173, 3174, 3175: 'n' is a, c, g or t
atgaataaaggtttacatcgcattatctttagtaaaaagcacagcaccatggttgcagtagccgaaactgccaacagccagggcaaaggtaaacaggcaggcagttcggtttctgtttcactgaaaacttcaggcgacctttgcggcaaactcaaaaccacccttaaaaccttggtctgctctttggtttccctgagtatggtattgcctgcccatgcccaaattaccaccgacaaatcagcacctaaaaaccagcaggtcgttatccttaaaaccaacactggtgcccccttggtgaatatccaaactccgaatggacgcggattgagccacaaccgctatacgcagtttgatgttgacaacaaaggggcagtgttaaacaacgaccgtaacaataatccgtttctggtcaaaggcagtgcgcaattgattttgaacgaggtacgcggtacggctagcaaactcaacggcatcgttaccgtaggcggtcaaaaggccgacgtgattattgccaaccccaacggcattaccgttaatggcggcggctttaaaaatgtcggtcggggcatcttaactatcggtgcgccccaaatcggcaaagacggtgcactgacaggatttgatgtgcgtcaaggcacattgaccgtaggagcagcaggttggaatgataaaggcggagccgactacaccggggtacttgctcgtgcagttgctttgcaggggaaattacagggtaaaaacctggcggtttctaccggtcctcagaaagtagattacgccagcggcgaaatcagtgcaggtacggcagcgggtacgaaaccgactattgcccttgatactgccgcactgggcggtatgtacgccgacagcatcacactgattgccaatgaaaaaggcgtaggcgtcaaaaatgccggcacactcgaagcggccaagcaattgattgtgacttcgtcaggccgcattgaaaacagcggccgcatcgccaccactgccgacggcaccgaagcttcaccgacttatctctccatcgaaaccaccgaaaaaggagcggcaggcacatttatctccaatggtggtcggatcgagagcaaaggcttattggttattgagacgggagaagatatcagcttgcgtaacggagccgtggtgcagaataacggcagtcgcccagctaccacggtattaaatgctggtcataatttggtgattgagagtaaaactaatgtgaacaatgccaaaggctcggctaatctgtcggccggcggtcgtactacgatcaatgatgctactattcaagcgggcagttccgtgtacagctccaccaaaggcgatactgaattgggtgaaaatacccgtattattgctgaaaacgtaaccgtattatctaacggtagtattggcagtgctgctgtaattgaggctaaagacactgcacacattgaatcgggcaaaccgctttctttagaaacctcgaccgttgcctccaacatccgtttgaacaacggtaacattaaaggcggaaagcagcttgctttactggcagacgataacattactgccaaaactaccaatctgaatactcccggcaatctgtatgttcatacaggtaaagatctgaatttgaatgttgataaagatttgtctgccgccagcatccatttgaaatcggataacgctgcccatattaccggcaccagtaaaaccctcactgcctcaaaagacatgggtgtggaggcaggcttgctgaatgttaccaataccaatctgcgtaccaactcgggtaatctgcacattcaggcagccaaaggcaatattcagcttcgcaataccaagctgaacgcagccaaggctctcgaaaccaccgcattgcagggcaatatcgtttcagacggccttcatgctgtttctgcagacggtcatgtatccttattggccaacggtaatgccgactttaccggtcacaataccctgacagccaaggccgatgtcaatgcaggatcggttggtaaaggccgtctgaaagcagacaataccaatatcacttcatcttcaggagatattacgttggttgccggcaacggtattcagcttggtgacggaaaacaacgcaattcaatcaacggaaaacacatcagcatcaaaaacaacggtggtaatgccgacttaaaaaaccttaacgtccatgccaaaagcggggcattgaacattcattccgaccgggcattgagcatagaaaataccaagctggagtctacccataatacgcatcttaatgcacaacacgagcgggtaacgctcaaccaagtagatgcctacgcacaccgtcatctaagcattaccggcagccagatttggcaaaacgacaaactgccttctgccaacaagctggtggctaacggtgtattggcactcaatgcgcgctattcccaaattgccgacaacaccacgctgagagcgggtgcaatcaaccttactgccggtaccgccctagtcaagcgcggcaacatcaattggagtaccgtttcgaccaagactttggaagataatgccgaattaaaaccattggccggacggctgaatattgaagcaggtagcggcacattaaccatcgaacctgccaaccgcatcagtgcgcataccgacctgagcatcaaaacaggcggaaaattgctgttgtctgcaaaaggaggaaatgcaggtgcgcctagtgctcaagtttcctcattggaagcaaaaggcaatatccgtctggttacaggagaaacagatttaagaggttctaaaattacagccggtaaaaacttggttgtcgccaccaccaaaggcaagttgaatatcgaagccgtaaacaactcattcagcaattattttcctacacaaaaagcggctgaactcaaccaaaaatccaaagaattggaacagcagattgcgcagttgaaaaaaagctcgcctaaaagcaagctgattccaaccctgcaagaagaacgcgaccgtctcgctttctatattcaagccatcaacaaggaagttaaaggtaaaaaacccaaaggcaaagaatatctgcaagccaagctttctgcacaaaatattgacttgatttccgcacaaggcatcgaaatcagcggttccgatattaccgcttccaaaaaactgaaccttcacgccgcnnnnncacacacttaa

SEQ ID NO: 72353 - DNA, 168 bp, Neisseria meningitidis; identical to SEQ ID NO: 39391

SEQ ID NO: 72354 - DNA, 513 bp, Neisseria meningitidis
atgattcaatccatagaaaaaccacaggaatctatcagaaaaaacagaaacccccaccgcgtcattcccgcgcaggcgggaatccaaaaacgcaacgcaacaggaatttatcggaaaaaacagaaacccccaccgcgtcattcccgcgcaggcgggaatccagaaacacaacgcggcaggactttatcggaaaaaaccgaaaccccaccgaccgtcattcccgcaaaagcgggaatccaaaaacgcaacgcaacaggaatccatcggaaaaaacagaaacccccaccgccgtcattcccgcgcaggcgggaatccagcaacacaacgcggcaggactttatcggaaaaaacagaaaccccaccgaccgtcattcccgcaaaagcgggaatctagaaacacaacgcggcaggactttatcagaaaaaacagaaaccccaccgccgtcattcccgcaaaagcgggaatccagacccgtcggcacggaatcttaccggataaaacagtttccttag

SEQ ID NO: 72355 - DNA, 579 bp, Neisseria meningitidis
atgattgaatccatagaaaaaccacaggaatctatcagaaaaaaccgaacccccaccgccgtcattcccgcgcaggcgggaatccaaagacgcaacgcaacaggaatttatcggaaaaaacagaacccccccaccgccgtcattcccgcgaaagcgggaatccagcaaccgaaaaaccacaggaatctatcagcaaaaacagaaaccccaccgccgtcattcccgcaaaagcgggaatccagcaaccgaaaaaccacaggaatctatcagcaaaaacagaaaccccaccgccgtcattcccgcaaaagcgggaatccaaaaacgcaacgcaacaggaatccatcggaaaaaacagaaaccccaccgaccgtcattcccgcaaaagctggaatccagcaaccgaaaaaccacaggaatctatcagcaaaaacagaaacccccaccgcgtcattcccgcaaaagctggaatccaaaaacgcaacgcaacaggaatttatcggaaaaaacagaaaccccaccgaccgtcattcccgcaaaagcgggaatccagacccgtcggcacggaatcttaccggataa

SEQ ID NO: 72356 - DNA, 477 bp, Neisseria meningitidis
atgagaaaactatcaatatcatcagatgagggattggttccaataagaacaattcaacaatttgctgaagatgtaggggtcgtttttcccgcgtcatatgtatcacttcttagtaaacatgatcatttataccctaaagaaaatattttcaattttgtcaatcaatacggtgaaaatgatgaaagggacatttcatttttagggtataagcaagatttaggctatgaagatatttatagctattcatgtattgatgatgaatatgggtatgcaaaaaaagtgattgcttttgggatttcagccaatggcgattatatctgttttgattacagaaaatgcaatgaaaatccatgtatcattctgatgtatcatgatgatttctatgaagatgagaatggggatacgaaaatggtaactagccatattgcagatagttttgatgcctttttggatatgctatatgaactttcagattaa

SEQ ID NO: 72357 - protein, 187 aa, Neisseria meningitidis
MKKIIIAALAAAAVGTASAATYKVDEYHANARFAIDHFNTSTNVGGFYGLTGSVEFDQAKRDGKIDITIPVANLQSGSQHFTDHLKSADIFDAAQYPDIRFVSTKFNFNGKKLVSVDGNLTMHGKTAPVKLKAEKFNCYQSPMEKTEVCGGDFSTTIDRTKWGVDYLVNVGMTKSVRIDIQIEAAKQ

SEQ ID NO: 72358 - protein, 187 aa, Neisseria meningitidis; identical to SEQ ID NO: 3051

SEQ ID NO: 72359 - protein, 187 aa, Neisseria meningitidis; identical to SEQ ID NO: 5159

SEQ ID NO: 72360 - protein, 187 aa, Neisseria meningitidis
MKKIIIAALAAAAIGTASAATYKVDEYHANARFSIDHFNTSTNVGGFYGLTGSVEFDQAKRDGKIDITIPVANLQSGSQHFTDHLKSADIFDAAQYPDIRFVSTKFNFNGKKLVSVDGNLTMHGKTAPVKLKAEKFNCYQSPMLKTEVCGGDFSTTIDRTKWGMDYLVNVGMTKSVRIDIQIEAAKQ

SEQ ID NO: 72361 - protein, 187 aa, Neisseria meningitidis
MKKIIFAALEAAAVGTASAATYKVDEYHANARFAIDHFNTSTNVGGFYGLTGSVEFDQAKRDGKIDITIPVANLQSGSQHFTDHLKSADIFDAAQYPDIRFVSTKFNFNGKKLVSVDGNLTMHGKTAPVKLKAEKFNCYQSPMAKTEVCGGDFSTTIDRTKWGVDYLVNVGMTKSVRIDIQIEAAKQ

SEQ ID NO: 72362 - protein, 187 aa, Neisseria meningitidis; identical to SEQ ID NO: 6499

SEQ ID NO: 72363 - protein, 187 aa, Neisseria meningitidis; identical to SEQ ID NO: 18661

SEQ ID NO: 72364 - protein, 187 aa, Neisseria meningitidis; identical to SEQ ID NO: 34514

SEQ ID NO: 72365 - protein, 194 aa, Neisseria meningitidis
MKKIIFAALAAAAISTASAAISTASAATYKVDEYHANARFAIDHFNTSTNVGGFYGLTGSVEFDQAKRDGKIDITIPIANLQSGSQHFTDHLKSADIFDAAQYPDIRFVSTKFNFNGKKLVSVDGNLTMHGKTAPVKLKAEKFNCYQSPMEKTEVCGGDFSTTIDRTKWGMDYLVNVGMTKSVRIDIQIEAAKQ

SEQ ID NO: 72366 - protein, 187 aa, Neisseria meningitidis; identical to SEQ ID NO: 14283

SEQ ID NO: 72367 - protein, 187 aa, Neisseria meningitidis
MKKIIFAALAAAAISTASAATYKVDEYHANARFAIDHFNTSTNVGGFYGLTDSVEFDQAKRDGKIDITIPIANLQSGSQHFTDHLKSADIFDAAQYPDIRFVSTKFNFNGKKLVSVDGNLTMHGKTAPVKLKAEKFNCYQSPMEKTEVCGGDFSTTIDRTKWGMDYLVNVGMTKSVRIDIQIEAAKQ

SEQ ID NO: 72368 - protein, 187 aa, Neisseria meningitidis; identical to SEQ ID NO: 8603

SEQ ID NO: 72369 - protein, 187 aa, Neisseria meningitidis
MKKIIFAALAAAAISTASAATYKVDEYHANARFAIDHFNTSTNVGGFYGLTGSVEFDQAKRDGKIDITIPIANLQSGSQHFTDHLKSADIFDAAQYPDIRFVSTKFNFNGKKLVSVDGNLTMHGKTAPVKLKAEKFNCYQSPMEKTEVCGGDFSTTIDRTKWGVDYLVNVGMTKSVRIDIQIEAAKQ

SEQ ID NO: 72370 - protein, 187 aa, Neisseria meningitidis; identical to SEQ ID NO: 1527

SEQ ID NO: 72371 - protein, 187 aa, Neisseria meningitidis
MKKIIIAALAAAAVGTASAATYKVDEYHANARFAIDHFNTSTNVGGFYGLTGSVEFDQAKRDGKIDITIPVANLQSGSQHFTDHLKSADIFDAAQYPDIRFVSTKFNFNGKKLVSVDGNLTMHGKTAPVKLKAEKFNCYQRPMEKTEVCGGDFSTTIDRTKWGVDYLVNVGMTKSVRIDIQIEAAKQ

SEQ ID NO: 72372 - protein, 187 aa, Neisseria meningitidis
MKKIIIAALAAAAIGTTSAATYKVDEYHANARFAIDHFNTSTNVGGFYGLTGSVEFDQAKRDGKIDITIPVANLQSGSQHFTDHLKSADIFDAAQYPNIRFVSTKFNFNGKKLVSVDGNLTMHGKTAPVKLKAEKFNCYQSPMLKTEVCGGDFSTTIDRTKWGMDYLVNVGMTKSVRIDIQIEAAKQ

SEQ ID NO: 72373 - protein, 187 aa, Neisseria meningitidis
MKKIIFAALAAAAVGTASAATYKVDEYHANARFAIDHFNTSTNVGGFYGLTGSVEFDQAKRDGKIDITIPVANLQSGSQHFTDHLKSADIFDATQYPNIRFVSTKFNFNGKKLVSVNGNLTMHGKTAPVKLKAEKFNCYQSPMAKTEVCGGDFSTTIDRTKWGVDYLVNVGMTKSVRIDIQIEAAKQ

SEQ ID NO: 72374 - protein, 187 aa, Neisseria meningitidis
MKKIIFAALAAAAVGTVSAATYKVDEYHANARFAIDHFNTSTNVGGFYGLTGSVEFDQAKRDGKIDITIPVANLQSGSQHFTDHLKSADIFDAAQYPDIRFVSTKFNFNGKKLVSVDGNLTMHGKTAPVKLKAEKFNCYQSPMAKTEVCGGDFSTTIDRTKWGVDYLVNVGMTKSVRIDIQIEAAKQ

SEQ ID NO: 72375 - protein, 187 aa, Neisseria meningitidis
MKKIIIAALAAAAVGTASAATYKVDEYHANARFAIDHFNTSTNVGGFYGLTGSVEFDQAKRDGKIDITIPVANLQSGSQHFTDHLKSADIFDAAQYPDIRFVSTKFNFNGKKLVSVDGNLTMHGKTAPVKLKAEKFNCYQSPMAKTEVCGGDFSTTIDRTKWGVDYLVNVGMTKSVRIDIQIEAAKQ

SEQ ID NO: 72376 - protein, 187 aa, Neisseria meningitidis
MKKIIFAALAAAAISTASAATYKVDEYHANARFAIDHFNTSTNVGGFYGLTGSVEFNQAKRDGKIDITIPIANLQSGSQHFTDHLKSADIFDAAQYPDIRFVSTKFNFNGKKLVSVDGNLTMHGKTAPVKLKAEKFNCYQSPMEKTEVCGGDFSTTIDRTKWGMDYLVNVGMTKSVRIDIQIEAAKQ

SEQ ID NO: 72377 - protein, 187 aa, Neisseria meningitidis
MKKIIIAALAAAAIGTTSAATYKVDEYHANARFAIDHFNTSTNVGGFYGLTGSVEFDQAKRDGKIDITIPVANLQSGSQHFTDHLKSADIFDAAQYPNIRFVSTKFNFNGKKLVSVDGNLTMHGKTAPVKLKAEKFNCYQSPMLKTEVCGGDFSTTIDRTQWGVDYLVNVGMTKSVRIDIQIEAANQ

SEQ ID NO: 72378 - protein, 187 aa, Neisseria meningitidis
MKKIIFAALAAAAVGTASAATYKVDEYHANARFAIDHFNTSTNVGGFYGLTGSVEFDQAKRDGKIDITNPVANLQSGSQHFTDHLKSADIFDAAQYPDIRFVSTKFNFNGKKLVSVDGNLTMHGKTAPVKLKAEKFNCYQSPMAKTEVCGGDFSTTIDRTKWGVDYLVNVGMTKSVRIDIQIEAAKQ

SEQ ID NO: 72379 - protein, 186 aa, Neisseria meningitidis
MKKIIFAALAAAAVGTASATYKVDEYHANVRFAIDHFNTSTNVGGFYGLTGSVEFDQAKRDGKIDITIPVANLQSGSQPFTGHLKSADIFDAAQYPDIRFVSTKFNFNGKKLVSVDGNLTMRGKTAPVKLKAEKFNCYQSPMAETEVCGGDFSTTIDRTKWGVDYLVNAGMTKNVRIDIQIEAAKQ

SEQ ID NO: 72380 - protein, 241 aa, Neisseria meningitidis
VNRTAFCCLSLTTALILTACSSGGGGVAADIGAGLADALTAPLDHKDKGLQSLTLDQSVRKNEKLKLAAQGAEKTYGNGDSLNTGKLKNDKVSRFDFIRQIEVDGQLITLESGEFQVYKQSHSALTAFQTEQIQDSEHSGKMVAKRQFRIGDIAGEHTSFDKLPEGGRATYRGTAFGSDDAGGKLTYTIDFAAKQGNGKIEHLKSPELNVDLAAADIKPDGKRHAVISGSVLYNQAEKGSY

SEQ ID NO: 72381 - protein, 241 aa, Neisseria meningitidis
VNRTAFCCLSLTTALILTACSSGGGGVAADIGAGLADALTAPLDHKDKGLQSLMLDQSVRKNEKLKLAAQGAEKTYGNGDSLNTGKLKNDKVSRFDFIRQIEVDGQLITLESGEFQVYKQSHSALTALQTEQVQDSEHSGKMVAKRQFRIGDIAGEHTSFDKLPEGGRATYRGTAFGSDDAGGKLIYTIDFAAKQGHGKIEHLKSPELNVDLAAAYIKPDEKHHAVISGSVLYNQAEKGSY

SEQ ID NO: 72382 - protein, 241 aa, Neisseria meningitidis
VNRTAFCCLSLTTALILTACSSGGGGVAADIGAGLADALTAPLDHKDKGLQSLMLDQSVRKNEKLKLAAQGAEKTYGNGDSLNTGKLKNDKVSRFDFIRQIEVDGQLITLESGEFQVYKQSHSALTALQTEQVQDSEDSGKMVAKRQFRIGDIAGEHTSFDKLPKDVMATYRGTAFGSDDAGGKLTYTIDFAAKQGHGKIEHLKSPELNVDLAAAYIKPDEKHHAVISGSVLYNQAEKGSY

SEQ ID NO: 72383 - protein, 241 aa, Neisseria meningitidis
VNRTAFCCLSLTAALILTACSSGGGGVAADIGAGLADALTAPLDHKDKSLQSLTLDQSVRKNEKLKLAAQGAEKTYGNGDSLNTGKLKNDKVSRFDFIRQIEVDGQLITLESGEFQVYKQSHSALTALQTEQVQDSEHSGKMVAKRQFRIGDIAGEHTSFDKLPEGGRATYRGTAFGSDDASGKLTYTIDFAAKQGHGKIEHLKSPELNVDLAASDIKPDKKRHAVISGSVLYNQAEKGSY

SEQ ID NO: 72384 - protein, 241 aa, Neisseria meningitidis
VNRTAFCCLSLTAALILTACSSGGGGVAADIGAVLADALTAPLDHKDKSLQSLTLDQSVRKNEKLKLAAQGAEKTYGNGDSLNTGKLKNDKVSRFDFIRQIEVDGQLITLESGEFQVYKQSHSALTALQTEQVQDSEHSGKMVAKRQFRIGDIAGEHTSFDKLPEGGRATYRGTAFGSDDASGKLTYTIDFAAKQGHGKIEHLKSPELNVDLAASDIKPDKKRHAVISGSVLYNQAEKGSY

SEQ ID NO: 72385 - protein, 241 aa, Neisseria meningitidis
VNRTTFCCLSLTAALILTACSSGGGGVAADIGAGLADALTAPLDHKDKGLQSLTLDQSVRKNEKLKLAAQGAEKTYGNGDSLNTGKLKNDKVSRFDFIRQIEVNGQLITLESGEFQVYKQSHSALTALQTEQVQDSEHSRKMVAKRQFRIGDIAGEHTSFDKLPKGDSATYRGTAFGSDDAGGKLTYTIDFAAKQGYGKIEHLKSPELNVDLAAAYIKPDEKHHAVISGSVLYNQDEKGSY

SEQ ID NO: 72386 - protein, 241 aa, Neisseria meningitidis
VNRTAFCCLSLTAALILTACSSGGGGVAADIGAGLADALTAPLDHKDKGLRSLTLDQSVRKNEKLKLAAQGAEKTYGNGDSLNTGKLKNDKVSRFDFIRQIEVDGQLITLESGEFQVYKQSHSALTALQTEQEQDLEHSGKMVAKRRFRIGDIAGEHTSFDKLREGGRATYRGTAFGSDDAGGKLTYTIDFAAKQGYGKIEHLKSPELNVDLAAADIKPDEKHHAVISGSVLYNQDEKGSY

SEQ ID NO: 72387 - protein, 241 aa, Neisseria meningitidis
VNRTAFCCLSLTAALILTACSSGGGGVAADIGAGLADALTAPLDHKDKGLQSLTLDQSVRKNEKLKLAAQGAEKTYGNGDSLNTGKLKNDKVSRFDFIRQIEVDGQLITLESGEFQVYKQSHSALTALQTEQVQDSEDSGKMVAKRQFRIGDIAGEHTSFDKLPKGGSATYRGTAFSSDDAGGKLTYTIDFAAKQGHGKIEHLKSPELNVELATAYIKPDEKRHAVISGSVLYNQDEKGSY

SEQ ID NO: 72388 - protein, 246 aa, Neisseria meningitidis
VNRTTFFCLSLTAALILTACSSGGGGSGGGGVAADIGAGLADALTAPLDHKDKGLQSLTLDQSVRKNEKLKLAAQGAEKTYGNGDSLNTGKLKNDKVSRFDFIRQIEVDGQLITLESGEFQVYKQSHSALTALQTEQVQDSEDSGKMVAKRQFRIGDIAGEHTSFDKLPKGGSATYRGTAFGSDDAGGKLTYTIDFAVKQGHGKIEHLKSPELNVDLAAAYIKPDKKRHAVISGSVLYNQDEKGSY

SEQ ID NO: 72389 - protein, 241 aa, Neisseria meningitidis
VNRTAFCCLSLTTALILTACSSGGGGVAADIGAGLADALTAPLDHKDKGLQSLMLDQSVRKNEKLKLAAQGAEKTYGNGDSLNTGKLKNDKVSRFDFIRQIEVDGKLITLESGEFQVYKQSHSALTALQTEQVQDSEDSGKMVAKRQFRIGDIAGEHTSFDKLPKGGSATYRGTAFGSDDAGGKLTYTIDFAAKQGHGKIEHLKSPELNVELATAYIKPDEKHHAVISGSVLYNQDEKGSY

SEQ ID NO: 72390 - protein, 241 aa, Neisseria meningitidis
VNRTAFCCLSLTTALILTACSSGGGGVAADIGAGLADALTAPLDHKDKGLQSLMLDQSVRKNEKLKLAAQGAEKTYGNGDSLNTGKLKNDKVSRFDFIRQIEVDGQLITLESGEFQVYKQSHSALTALQTEQVQDSEDSGKMVAKRQFRIGDIAGEHTSFDKLPKDVMATYRGTAFGSDDAGGKLTYTIDFAAKQGHGKIEHLKSPELNVELAAAYIKPDEKHHAVISGSVLYNQDEKGSY

SEQ ID NO: 72391 - protein, 241 aa, Neisseria meningitidis
VNRTAFCCFSLTAALILTACSSGGGGVAADIGAGLADALTAPLDHKDKSLQSLTLDQSVRKNEKLKLAAQGAEKTYGNGDSLNTGKLKNDKVSRFDFIRQIEVDGQLITLESGEFQVYKQSHSALTALQTEQVQDSEDSGKMVAKRQFRIGDIAGEHTSFDKLPKGGSATYRGTAFGSDDAGGKLTYTIDFAAKQGHGKIEHLKSPELNVELATAYIKPDEKRHAVISGSVLYNQDEKGSY

SEQ ID NO: 72392 - protein, 241 aa, Neisseria meningitidis
VNRTAFCCFSLTAALILTACSSGGGGVAADIGAGLADALTAPLDHKDKGLQSLTLDQSVRKNEKLKLAAQGAEKTYGNGDSLNTGKLKNDKVSRFDFIRQIEVDGKLITLESGEFQVYKQSHSALTALQTEQVQDSEDSGKMVAKRQFRIGDIAGEHTSFDKLPKGGSATYRGTAFGSDDAGGKLTYTIDFAAKQGHGKIEHLKSPELNVELATAYIKPDEKRHAVISGSVLYNQDEKGSY

SEQ ID NO: 72393 - protein, 241 aa, Neisseria meningitidis
VNRTAFCCFSLTAALILTACSSGGGGVAADIGAGLADALTAPLDHKDKSLQSLTLDQSVRKNEKLKLAAQGAEKTYGNGDSLNTGKLKNDKVSRFDFIRQIEVDGQLITLESGEFQVYKQSHSALTALQTEQEQDPEHSGKMVAKRRFKIGDIAGEHTSFDKLPKDVMATYRGTAFGSDDAGGKLTYTIDFAAKQGHGKIEHLKSPELNVELATAYIKPDEKHHAVISGSVLYNQDEKGSY

SEQ ID NO: 72394 - protein, 249 aa, Neisseria meningitidis
VNRTTFCCLSLTAALILTACSSGGGGSGGGGVAADIGAGLADALTAPLDHKDKGLKSLTLEDSISQNGTLTLSAQGAERTFKAGDKDNSLNTGKLKNDKISRFDFIRQIEVDGQLITLESGEFQVYKQSHSALTALQTEQVQDSEHSGKMVAKRQFRIGDIVGEHTSFGKLPKDVMATYRGTAFGSDDAGGKLTYTIDFAAKQGHGKIEHLKSPELNVDLAAADIKPDEKHHAVISGSVLYNQAEKGSY

SEQ ID NO: 72395 - protein, 240 aa, Neisseria meningitidis
VNRTAFCCLSLTAALILTACSSGGGGVAADIGAGLADALTAPLDHKDKSLQSLTLDQSVRKNEKLKLAAQGAEKTYGNGDSLNTGKLKNDKVSRFDFIRQIEVDGQLITLESGEFQIYKQDHSAVVALQIEKINNPDKIDSLINQRSFLVSGLGGEHTAFNQLPDGKAEYHGKAFSSDDAGGKLTYTIDFAAKQGHGKIEHLKTPEQNVELAAAELKADEKSHAVILGDTRYGSEEKGTY

SEQ ID NO: 72396 - protein, 240 aa, Neisseria meningitidis
VNRTAFCCLSLTAALILTACSSGGGGVAADIGAGLADALTAPLDHKDKSLQSLTLDQSVRKNEKLKLAAQGAEKTYGNGDSLNTGKLKNDKVSRFDFIRQIEVDGQLITLESGEFQIYKQDHSAVVALQIEKINNPDKIDSLINQRSFLVSGLGGEHTAFNQLPGGKAEYHGKAFSSDDAGGKLTYTIDFAAKQGHGKIEHLKTPEQNVELAAAELKADEKSHAVILGDTRYGSEEKGTY

SEQ ID NO: 72397 - protein, 240 aa, Neisseria meningitidis
VNRTAFCCLSLTTALILTACSSGGGGVAADIGAGLADALTAPLDHKDKSLQSLTLDQSVRKNEKLKLAAQGAEKTYGNGDSLNTGKLKNDKVSRFDFIRQIEVDGQLITLESGEFQIYKQDHSAVVALQIEKINNPDKIDSLINQRSFLVSGLGGEHTAFNQLPGGKAEYHGKAFSSDDAGGKLTYTIDFAAKQGHGKIEHLKTPEQNVELAAAELKADEKSHAVILGDTRYGSEEKGTY

SEQ ID NO: 72398 - protein, 240 aa, Neisseria meningitidis
VNRTAFCCLSLTAALILTACSSGGGGVAADIGAGLADALTAPLDHKDKSLQSLTLDQSVRKNEKLKLAAQGAEKTYGNGDSLNTGKLKNDKVSRFDFIRQIEVDGQLITLESGEFQIYKQDHSAVVALQIEKINNPDKIDSLINQRSFLVSGLGGEHTAFNQLPSGKAEYHGKAFSSDDAGGKLTYTIDFAAKQGHGKIEHLKTPEQNVELASAELKADEKSHAVILGDTRYGGEEKGTY

SEQ ID NO: 72399 - protein, 240 aa, Neisseria meningitidis
VNRTAFCCLSLTAALILTACSSGGGGVAADIGAGLADALTAPLDHKDKSLQSLTLDQSVRKNEKLKLAAQGAEKTYGNGDSLNTGKLKNDKVSRFDFIRQIEVDGQLITLESGEFQIYKQDHSAVVALQIEKINNPDKIDSLINQRSFLVSGLGGEHTAFNQLPSGKAEYHGKAFSFDDAGGKLTYTIDFAAKQGHGKIEHLKTPEQNVELASAELKADEKSHAVILGDTRYGGEEKGTY

SEQ ID NO: 72400 - protein, 240 aa, Neisseria meningitidis
VNRTAFCCLSLTAALILTACSSGGGGVAADIGAGLADALTAPLDHKDKSLQSLTLDQSVRKNEKLKLAAQGAEKTYGNGDSLNTGKLKNDKVSRFDFIRQIEVDGQLITLESGEFQIYKQDHSAVVALQIEKINNPDKIDSLINQRSFLVSGLGGEHTAFNQLPGGKAEYHGKAFSSDDPNGRLHYSIDFTKKQGYGRIEHLKTPEQNVELASAELKADEKSHAVILGDTRYGSEEKGTY

SEQ ID NO: 72401 - protein, 240 aa, Neisseria meningitidis
VNRTAFCCLSLTAALILTACSSGGGGVAADIGAGLADALTAPLDHKDKSLQSLTLDQSVRKNEKLKLAAQGAEKTYGNGDSLNTGKLKNDKVSRFDFIRQIEVDGQLITLESGEFQIYKQDHSAVVALQIEKINNPDKIDSLINQRSFLVSGLGGEHTAFNQLPSGKAEYHGKAFSSDDPNGRLHYSIDFTKKQGYGRIEHLKTPEQNVELASAELKADEKSHAVILGDTRYGGEEKGTY

SEQ ID NO: 72402 - protein, 240 aa, Neisseria meningitidis
VNRTAFCCLSLTAALILTACSSGGGGVAADIGAGLADALTAPLDHKDKGLQSLTLDQSVRKNEKLKLAAQGAEKTYGNGDSLNTGKLKNDKVSRFDFIRQIEVDGQLITLESGEFQIYKQDHSAVVALQIEKINNPDKIDSLINQRSFLVSGLGGEHTAFNQLPSGKAEYHGKAFSSDDPNGRLHYSIDFTKKQGYGRIEHLKTPEQNVELASAELKADEKSHAVILGDTRYGGEEKGTY

SEQ ID NO: 72403 - protein, 240 aa, Neisseria meningitidis
VNRTAFCCLSLTAALILTACSSGGGGVAADIGAGLADALTAPLDHKDKSLQSLTLDQSVRKNEKLKLAAQGAEKTYGNGDSLNTGKLKNDKVSRFDFIRQIEVDGQTITLASGEFQIYKQNHSAVVALQIEKINNPDKIDSLINQRSFLVSGLGGEHTAFNQLPDGKAEYHGKAFSSDDPNGRLHYSIDFTKKQGYGRIEHLKTPEQNVELASAELKADEKSHAVILGDTRYGGEEKGTY

SEQ ID NO: 72404 - protein, 240 aa, Neisseria meningitidis
VNRTAFCCLSLTAALILTACSSGGGGVAADIGAGLADALTTPLDHKDKSLQSLTLDQSVRKNEKLKLAAQGAEKTYGNGDSLNTGKLKNDKVSRFDFIRQIEVDGQTITLASGEFQIYKQNHSAVVALQIEKINNPDKIDSLINQRSFLVSGLGGEHTAFNQLPDGKAEYHGKAFSSDDPNGRLHYSIDFTKKQGYGRIEHLKTPEQNVELASAELKADEKSHAVILGDTRYGGEEKGTY

SEQ ID NO: 72405 - protein, 240 aa, Neisseria meningitidis
VNRTAFCCLFLTTALILTACSSGGGGVAADIGVGLADALTTPLDHKDKGLQSLTLDQSVRKNEKLKLAAQGAEKTYGNGDSLNTGKLKNDKVSRFDFIRQIEVDGQTITLASGEFQIYKQNHSAVVALQIEKINNPDKIDSLINQRSFLVSGLGGEHTAFNQLPDGKAEYHGKAFSSDDPNGRLHYSIDFTKKQGYGRIEHLKTPEQNVELASAELKADEKSHAVILGDTRYGGEEKGTY

SEQ ID NO: 72406 - protein, 240 aa, Neisseria meningitidis
VNRTAFCCLSLTTALILTACSSGGGGVAADIGAGLADALTAPLDHKDKGLQSLTLDQSVRKNEKLKLAAQGAEKTYGNGDSLNTGKLKNDKVSRFDFIRQIEVDGQLITLESGEFQIYKQDHSAVVALQIEKINNPDKIDSLINQRSFLVSGLGGEHTAFNQLPDGKAEYHGKAFSSDDAGGKLTYTIDFAAKQGHGKIEHLKTPEQNVELAAAELKADEKSHAVILGDTRYGSEEKGTY

SEQ ID NO: 72407 - protein, 248 aa, Neisseria meningitidis
VNRTAFCCLSLTTALILTACSSGGGGSGGGGVAADIGTGLADALTAPLDHKDKGLKSLTLEDSIPQNGTLTLSAQGAEKTFKAGDKDNSLNTGKLKNDKISRFDFVQKIEVDGQTITLASGEFQIYKQNHSAVVALQIEKINNPDKTDSLINQRSFLVSGLGGEHTAFNQLPGGKAEYHGKAFSSDDPNGRLHYSIDFTKKQGYGRIEHLKTLEQNVELAAAELKADEKSHAVILGDTRYGSEEKGTY

SEQ ID NO: 72408 - protein, 248 aa, Neisseria meningitidis
VNRTTFCCLSLTTALILTACSSGGGGSGGGGVAADIGAGLADALTAPLDHKDKGLKSLTLEDSIPQNGTLTLSAQGAEKTFKAGGKDNSLNTGKLKNDKISRFDFVQKIEVDGQTITLASGEFQIYKQDHSAVVALQIEKINNPDKTDSLINQRSFLVSGLGGEHTAFNQLPGGKAEYHGKAFSSDDPNGRLHYTIDFTNKQGYGRIEHLKTPEQNVELASAELKADEKSHAVILGDTRYGSEEKGTY

SEQ ID NO: 72409 - protein, 248 aa, Neisseria meningitidis
VNRTTFCCLSLTAALILTACSSGGGGSGGGGVAADIGTGLADALTAPLDHKDKGLKSLTLEDSIPQNGTLTLSAQGAEKTFKAGDKDNSLNTGKLKNDKISRFDFVQKIEVDGQTITLASGEFQIYKQNHSAVVALQIEKINNPDKIDSLINQRSFLVSGLGGEHTAFNQLPGDKAEYHGKAFSSDDPNGRLHYTIDFTNKQGYGRIEHLKTPELNVDLASAELKADEKSHAVILGDTRYGSEEKGTY

SEQ ID NO: 72410 - protein, 248 aa, Neisseria meningitidis
VNRTAFCCLFLTTALILTACSSGGGGSGSGGVAADIGTGLADALTTPLDHKDKGLKSLTLEDSIPQNGTLTLSAQGAEKTFKAGDKDNSLNTGKLKNDKISRFDFVQKIEVDGQTITLASGEFQIYKQDHSAVVALQIEKINNPDKIDSLINQRSFLVSGLGGEHTAFNQLPGGKAEYHGKAFSSDDAGGKLTYTIDFAAKQGHGKIEHLKTPEQNVELAAAELKADEKSHAVILGDTRYGSEEKGTY

SEQ ID NO: 72411 - protein, 240 aa, Neisseria meningitidis
VNRTAFCCLSLTTALILTACSSGGGGVAADIGAGLADALTAPLDHKDKGLQSLMLDQSVRKNEKLKLAAQGAEKTYGNGDSLNTGKLKNDKVSRFDFIRQIEVDGQTITLASGEFQIYKQNHSAVVALQIEKINNPDKIDSLINQRSFLVSGLGGEHTAFNQLPDGKAEYHGKAFSSDDPNGRLHYSIDFTKKQGYGRIEHLKTPEQNVELASAELKADEKSHAVILGDTRYGGEEKGTY

SEQ ID NO: 72412 - protein, 241 aa, Neisseria meningitidis
VNRTTFCCLSLTAALILTACSSGGGGVAADIGAGLADALTAPLDHKDKGLQSLTLDQSVRKNEKLKLAAQGAEKTYGNGDSLNTGKLKNDKVSRFDFIRQIEVDGQLITLESGEFQVYKQSHSALTALQTEQVQDSEHSGKMVAKRQFRIGDIAGEHTSFDKLPEGGRATYRGTAFSSDDAGGKLTYTIDFAAKQGHGKIEHLKSPELNVDLAAADIKPDEKHHAVISGSVLYNQDEKGSY

SEQ ID NO: 72413 - protein, 241 aa, Neisseria meningitidis
VNRTAFCCLSLTAALILTACSSGGGGVAADIGAGLADALTAPLDHKDKSLQSLTLDQSVRKNEKLKLAAQGAEKTYGNGDSLNTGKLKNDKVSRFDFIRQIEVDGQLITLESGEFQVYKQSHSALTALQTEQVQDSEHSGKMVAKRQFRIGDIAGEHTSFDKLPEGGRATYRGTAFGSDDASGKLTYTIDFAAKQGHGKIEHLKSLELNVDLAASDIKPDKKRHAVISGSVLYNQAEKGSY

SEQ ID NO: 72414 - protein, 241 aa, Neisseria meningitidis
VNRTAFCCLSLTTALILTACSSGGGGVTADIGTGLADALTAPLDHKDKGLKSLTLEDSISQNGTLTLSAQGAEKTYGNGDSLNTGKLKNDKVSRFDFIRQIEVDGKLITLESGEFQVYKQSHSALTALQTEQVQDSEDSGKMVAKRQFRIGDIAGEHTSFDKLPKGGSATYRGTAFGSDDAGGKLTYTIDFAAKQGHGKIEHLKSPELNVELATAYIKPDEKHHAVISGSVLYNQDEKGSY

SEQ ID NO: 72415 - protein, 248 aa, Neisseria meningitidis
VNRTAFCCLFLTTALILTACSSGGGGSGGGGVAADIGTGLADALTAPLDHKDKGLKSLTLEDSIPQNGTLTLSAQGAEKTFKAGDKDNSLNTGKLKNDKISRFDFVQKIEVDGQTITLASGEFQIYKQDHSAVVALQIEKINNPDKIDSLINQRSFLVSGLGGEHTAFNQLPGGKAEYHGKAFSSDDAGGKLTYTIDFAAKQGHGKIEHLKTPEQNVELAAAELKADEKSHAVILGDTRYGSEEKGTY

SEQ ID NO: 72416 - protein, 248 aa, Neisseria meningitidis
VNRTAFCCLFLTTALILTACSSGGGGSGGGGVAADIGTGLADALTAPLDHKDKGLKSLTLEDSIPQNGTLTLSAQGAEKTFKAGDKDNSLNTGKLKNDKISRFDFVQKIEVDGQTITLASGEFQIYKQDHSAVVALQIEKINNPDKIDSLINQRSFLVSGLGGEHTAFNQLPGGKAEYHGKAFSSDDAGGKLTYTIDFAAKQGHGKIEHLKTPEQNVELAAAELKADEKSHAVILGDTRYDSEEKGTY

SEQ ID NO: 72417 - protein, 240 aa, Neisseria meningitidis
VNRTAFCCLSLTAALILTACSSGGGGVAADIGAGLADALTAPLDHKDKSLQSLTLDQSVRKNEKLKLAAQGAEKTYGNGDSLNTGKLKNDKVSRFDFIRQIEVDGQLITLESGEFQIYKQNHSAVVALQIEKINNPDKIDSLINQRSFLVSGLGGEHTAFNQLPGGKAEYHGKAFSSDDPNGRLHYSIDFTKKQGYGRIEHLKTPEQNVELASAELKADEKSHAVILGDTRYGSEEKGTY

SEQ ID NO: 72418 - protein, 246 aa, Neisseria meningitidis
VNRTAFCCLFLTTALILTACSSGGGGSGGIAADIGTGLADALTAPLDHKDKGLKSLTLEDSIPQNGTLTLSAQGAEKTFKAGDKDNSLNTGKLKNDKISRFDFVQKIEVDGQTITLASGEFQIYKQDHSAVVALQIEKINNPDKIDSLINQRSFLVSGLGGEHTAFNQLPGGKAEYHGKAFSSDDAGGKLTYTIDFAAKQGHGKIEHLKTPEQNVELAAAELKADEKSHAVILGDTRYGSEEKGTY

SEQ ID NO: 72419 - protein, 240 aa, Neisseria meningitidis
VNRTAFCCFSLTAALILTACSSGGGGVAADIGAGLADALTAPLDHKDKGLQSLTLDQSVRKNEKLKLAAQGAEKTYGNGDSLNTGKLKNDKVSRFDFIRQIEVDGQLITLESGEFQIYKQDHSAVVALQIEKINNPDKIDSLINQRSFLVSGLGGEHTAFNQLPSGKAEYHGKAFSSDDPNGRLHYSIDFTKKQGYGRIEHLKTPEQNVELASAELKADEKSHAVILGDTRYGGEEKGTY

SEQ ID NO: 72420 - protein, 241 aa, Neisseria meningitidis
VNRTAFCCLSLTAALILTACSSGGGGVAADIGAGLADALTAPLDHKDKSLQSLTLDQSVRKNEKLKLAAQGAEKTYGNGDSLNTGKLKNDKVSRFDFIRQIEVDGQLITLESGEFQVYKQSHSALTAFQTEQIQDSEHSGKMVAKRQFRIGDIAGEHTSFDKLPEGGRATYRGTAFGSDDAGGKLTYTIDFAAKQGNGKIEHLKSPELNVDLAAADIKPDGKRHAVISGSVLYNQAEKGSY

SEQ ID NO: 72421 - protein, 247 aa, Neisseria meningitidis
VNRTAFCCLSLTAALILTACSSGSGSGGGGVAADIGTGLADALTAPLDHKDKGLKSLTLEDSISQNGTLTLSAQGAEKTFKVGDKDNSLNTGKLKNDKISRFDFVQKIEVDGQTITLASGEFQIYKQDHSAVVALQIEKINNPDKIDSLINQRSFLVSGLGGEHTAFNQLPSGKAEYHGKAFSSDDAGGKLTYTIDFAAKQGHGKIEHLKTPEQNVELASAELKADEKSHAVILGDTRYGSEEKGTY

SEQ ID NO: 72422 - protein, 240 aa, Neisseria meningitidis
VNRTAFCCLSLTAALILTACSSGGGGVAADIGAGLADALTAPLDHKDKSLQSLTLDQSVRKNEKLKLAAQGAEKTYGNGDSLNTGKLKNDKVSRFDFIRQIEVDGQLITLESGEFQIYKQDHSAVVALQIEKINNPDKIDSLINQRSFLVSGLGGEHTAFNQLPVDKAEYHGKAFSSDDAGGKLTYTIDFAAKQGHGKIEHLKTPEQNVELASAELKADEKSHAVILGDTRYGSEEKGTY

SEQ ID NO: 72423 - protein, 240 aa, Neisseria meningitidis
VNRTAFCCLSLTTALILTACSSGGGGVAADIGTGLADALTAPLDHKDKGLQSLTLDQSVRKNEKLKLAAQGAEKTYGNGDSLNTGKLKNDKVSRFDFIRQIEVDGQLITLESGEFQIYKQDHSAVVALQIEKINNPDKIDSLINQRSFLVSGLGGEHTAFNQLPSGKAEYHGKAFSSDDAGGKLTYTIDFAAKQGHGKIEHLKTPEQNVELASAELKADEKSHAVILGDTRYGGEEKGTY

SEQ ID NO: 72424 - protein, 242 aa, Neisseria meningitidis
VNRTAFCCLSLTAALILTACSSGSGGGGVAADIGTGLAYALTAPLDHKDKSLQSLTLDQSVRKNEKLKLAAQGAEKTYGNGDSLNTGKLKNDKVSRFDFIRQIEVDGQLITLESGEFQIYKQDHSAVVALQIEKINNPDKIDSLINQRSFLVSGLGGEHTAFNQLPGGKAEYHGKAFSSDDPNGRLHYSIDFTKKQGYGRIEHLKTPEQNVELASAELKADEKSHAVILGDTRYGGEEKGTY

SEQ ID NO: 72425 - protein, 241 aa, Neisseria meningitidis
VNRTAFCCLSLTTALILTSCSSGGGGVAADIGAGLADALTAPLDHKDKGLQSLMLDQSVRKNEKLKLAAQGAEKTYGNGDSLNTGKLKNDKVSRFDFIRQIEVDGQLITLESGEFQVYKQSHSALTALQTEQVQDSEHSGRMVAKRQFRIGDIAGEHTSFDKLPEGGRATYRGTAFGSDDAGGKLIYTIDFAAKQGHGKIEHLKSPELNVDLAAAYIKPDEKHHAVISGSVLYNQAEKGSY

SEQ ID NO: 72426 - protein, 241 aa, Neisseria meningitidis
VNRTAFCCFSLTAALILTACSSGGGGVAADIGAGLADALTAPLDHKDKSLQSLTLDQSVRKNEKLKLAAQGAEKTYGNGDSLNTGKLKNDKVSRFDFIRQIEVDGQLITLESGEFQIYKQDHSALTALQTEQEQDPEHSGKMVAKRRFKIGDIAGEHTSFDKLPKDVMATYRGTAFGSDDAGGKLTYTIDFAAKQGHGKIEHLKSPELNVELATAYIKPDEKHHAVISGSVLYNQDEKGSY

SEQ ID NO: 72427 - protein, 245 aa, Neisseria meningitidis
VNRTAFCCLFLTTALILTACSSGGGGSGGGGVAADIGVGLADALTTPLDHKDKGLQSLTLDQSVRKNEKLKLAAQGAEKTYGNGDSLNTGKLKNDKVSRFDFIRQIEVDGQTITLASGEFQIYKQNHSAVVALQIEKINNPDKIDSLINQRSFLVSGLGGEHTAFNQLPDGKAEYHGKAFSSDDPNGRLHYSIDFTKKQGYGRIEHLKTPEQNVELASAELKADEKSHAVILGDTRYGGEEKGTY

SEQ ID NO: 72428 - protein, 240 aa, Neisseria meningitidis
VNRTAFCCFSLTAALILTACSSGGGGVAADIGAGLADALTAPLDHKDKSLQSLTLDQSVRKNEKLKLAAQGAEKTYGNGDSLNTGKLKNDKVSRFDFIRQIEVDGQLITLESGEFQIYKQDHSAVVALQIEKINNPDKIDSLINQRSFLVSGLGGEHTAFNQLPSGKAEYHGKAFSSDDAGGKLTYTIDFAAKQGHGKIEHLKTPEQNVELASAELKADEKSHAVILGDTRYGGEEKGTY

SEQ ID NO: 72429 - protein, 248 aa, Neisseria meningitidis
VNRTTFCCLSLTTALILTACSSGGGGSGGGGVAADIGAGLADALTAPLDHKDKGLKSLTLEDSIPQNGTLTLSAQGAEKTFKAGGKDNSLNTGKLKNDKISRFDFVQKIEVDGQTITLASGEFQIYKQNHSAVVALQIEKINNPDKTDSLINQRSFLVSGLGGEHTAFNQLPGGKAEYHGKAFSSDDPNGRLHYTIDFTNKQGYGRIEHLKTPEQNVELASAELKADEKSHAVILGDTRYGSEEKGTY

SEQ ID NO: 72430 - protein, 246 aa, Neisseria meningitidis
VNRTAFCCLSLTAALILTACSSGGGGSGGGGVAADIGAGLADALTAPLDHKDKGLQSLMLDQSVRKNEKLKLAAQGAEKTYGNGDSLNTGKLKNDKVSRFDFIRQIEVDGRLITLESGEFQVYKQSYSALTALQTEQVQDSEDSRKMVAKRQFRIGDIAGEHTSFDKLPESDRATYRGTAFSSDDAGGKLTYTIDFAVKQGHGKIEHLKSPELNVELATAYIKPDEKHHAVISGSVLYNQDEKGSY

SEQ ID NO: 72431 - protein, 240 aa, Neisseria meningitidis
VNRTAFCCFSLTAALILTACSSGGGGVAADIGAGLADALTAPLDHKDKSLQSLTLDQSVRKNEKLKLAAQGAEKTYGNGDSLNTGKLKNDKVSRFDFIRQIEVDGQTITLASGEFQIYKQNHSAVVALQIEKINNPDKIDSLINQRSFLVSGLGGEHTAFNQLPDGKAEYHGKAFSSDDPNGRLHYSIDFTKKQGYGRIEHLKTPEQNVELASAELKADEKSHAVILGDTRYGGEEKGTY

SEQ ID NO: 72432 - protein, 240 aa, Neisseria meningitidis
VNRTAFCCLSLTAALILTACSSGGGGVAADIGAGLADALTTPLDHKDKSLQSLTLDQSVRKNEKLKLAAQGAEKTYGNGDSLNTGKLKNDKVSRFDFIRQIEVDGQLITLESGEFQIYKQNHSAVVALQIEKINNPDKIDSLINQRSFLVSGLGGEHTAFNQLPSGKAEYHGKAFSSDDPNGRLHYSIDFTKKQGYGRIEHLKTPEQNVELASAELKADEKSHAVILGDTRYGGEEKGTY

SEQ ID NO: 72433 - protein, 240 aa, Neisseria meningitidis
VNRTAFCCLSLTTALILTACSSGGGGVAADIGAGLADALTAPLDHKDKGLQSLTLDQSVRKNEKLKLAAQGAEKTYGNGDSLNTGKLKNDKVSRFDFIRQIEVDGQTITLASGEFQIYKQNHSAVVALQIEKINNPDKIDSLINQRSFLVSGLGGEHTAFNQLPDGKAEYHGKAFSSDDPNGRLHYSIDFTKKQGYGRIEHLKTPEQNVELASAELKADEKSHAVILGDTRYGGEEKGTY

SEQ ID NO: 72434 - protein, 240 aa, Neisseria meningitidis
VNRTAFCCLSLTAALILTACSSGGGGVAADIGAGLADALTTPLDHKDKSLQSLTLDQSVRKNEKLKLAAQGAEKTYGNGDSLNTGKLKNDKVSRFDFIRQIEVDGQTITLASGEFQIYKQNHSAVVALQIEKINNPDKIDSLINQRSFLVSGLGGEHTAFNQLPSGKAEYHGKAFSSDDPNGRLHYSIDFTKKQGYGRIEHLKTPEQNVELASAELKADEKSHAVILGDTRYGGEEKGTY

SEQ ID NO: 72435 - protein, 241 aa, Neisseria meningitidis
VNRTAFCCLSLTTALILTACSSGGGGVAADIGAGLADALTAPLDHKDKGLQSLTLDQSVRKNEKLKLAAQGAEKTYGNGDSLNTGKLKNDKISRFDFIRQIEVDGQLITLESGEFQVYKQSHSALTALQTEQVQDSEDSGKMVAKRQFRIGDIAGEHTSFDKLPKGGRATYRGTAFGSDDAGGKLTYTIDFAAKQGHGKIEHLKSPELNVDLAAAYIKPDEKRHAVISGSVLYNQDEKGSY

SEQ ID NO: 72436 - protein, 241 aa, Neisseria meningitidis
VNRTAFCCLFLTTTLILTACSSGGGGVAADIGAGLADALTAPLDHKDKGLQSLMLDQSVRKNEKLKLAAQGAEKTYGNGDSLNTGKLKNDKVSRFDFIRQIEVDGQLITLESGEFQVYKQSHSALTALQTEQEQDPEHSEKMVAKRRFKIGDIAGEHTSFDKLPKDVMATYRGTAFGSDDAGGKLTYTIDFAAKQGHGKIEHLKSPELNVDLAVAYIKPDEKHHAVISGSVLYNQDEKGSY

SEQ ID NO: 72437 - protein, 241 aa, Neisseria meningitidis
VNRTAFCCLSLTAALILTACSSGGGGVAADIGAGLADALTAPLDHKDKGLQSLTLDQSVRKNEKLKLAAQGAEKTYGNGDSLNTGKLKNDKVSRFDFIRQIEVDGQLITLESGEFQVYKQSHSALTAFQTEQIQDSEHSGKMVAKRRFRIGDIAGEHTSFDKLPEGGRATYRGTAFGSDDAGGKLTYTIDFAAKQGHGKIEHLKSPELNVDLAAADIKPDEKHHAVISGSVLYNQDEKGSY

SEQ ID NO: 72438 - protein, 240 aa, Neisseria meningitidis
VNRTAFCCLSLTAALILTACSSGGGGVAADIGARLADALTAPLDHKDKSLQSLTLDQSVRKNEKLKLAAQGAEKTYGNGDSLNTGKLKNDKVSRFDFIRQIEVDGQLITLESGEFQIYKQDHSAVVALQIEKINNPDKIDSLINQRSFLVSGLGGEHTAFNQLPDGKAEYHGKAFSSDDAGGKLTYTIDFAAKQGHGKIEHLKTPEQNVELAAAELKADEKSHAVILGDTRYGSEEKGTY

SEQ ID NO: 72439 - protein, 248 aa, Neisseria meningitidis
VNRTAFCCLSLTTALILTACSSGGGGSGGGGVAADIGTGLADALTAPLDHKDKGLKSLTLEASIPQNGTLTLSAQGAEKTFKAGGRDNSLNTGKLKNDKVSRFDFVQKIEVDGQTITLASGEFQIYKQDHSAVVALQIEKINNPDKIDSLINQRSFLVSGLGGEHTAFNQLPGGKAEYHGKAFSSDDPNGRLHYSIDFTKKQGYGRIEHLKTPEQNVELAAAELKADEKSHAVILGDTRYGSEEKGTY

SEQ ID NO: 72440 - protein, 246 aa, Neisseria meningitidis
VNRTAFCCLFLTTALILTACSSGGGGSGGIAADIGTGLADALTAPLDHKDKGLKSLTLEDSIPQNGTLTLSAQGAEKTFKAGDKDNSLNTGKLKNDKISRFDFVQKIEVDGQTITLASGEFQIYKQDHSAVVALQIEKINNPDKIDSLINQRSFLVSGLGGEHTAFNQLPGGKAEYHGKAFSSDDPNGRLHYSIDFTKKQGYGRIEHLKTPEQNVELASAELKADEKSHAVILGDTRYGSEEKGTY

SEQ ID NO: 72441 - protein, 240 aa, Neisseria meningitidis
MNRTAFCCLSLTTALILTACSSGGGGVAADIGAGLADALTAPLDHKDKGLQSLTLDQSVRKNEKLKLAAQGAEKTYGNGDSLNTGKLKNDKVSRFDFIRQIEVDGQLITLESGEFQIYKQDHSAVVALQIEKINNPDKIDSLINQRSFLVSGLGGEHTAFNQLPSGKAEYHGKAFSSDDPNGRLHYSIDFTKKQGYGRIEHLKTPEQNVELASAELKADEKSHAVILGDTRYGGEEKGTY

SEQ ID NO: 72442 - protein, 241 aa, Neisseria meningitidis
VNRTAFCCFSLTAALILTACSSGGGGVAADIGAGLADALTAPLDHKDKGLQSLTLDQSVRKNEKLKLAAQGAEKTYGNGDSLNTGKLKNDKVSRFDFIRQIEVDGKLITLESGEFQVYKQSHSALTALQTEQVQDSEDSGKMVAKRQFRIGDIAGEHTSFDKLPKGGSATYRGTAFGSDDAGGKLTYTIDFAAKQGHGKIEHLKSPELNVELATAELKADEKSHAVILGDTRYGGEEKGTY

SEQ ID NO: 72443 - protein, 248 aa, Neisseria meningitidis
VNRTAFCCLFLTTALILTACSSGGGGSGSGGVAADIGTGLADALTTPLDHKDKGLKSLTLEDSIPQNGTLTLSAQGAEKTFKAGDKDNSLNTGKLKNDKISRFDFVQKIEVDGQTITLASGEFQIYKQDHSAVVALQIEKINNPDKIDSLINQRSFLVSGLGGEHTAFNQLPGGKAEYHGKAFSSDDAGGKLTYTIDFASKQGHGKIEHLKTPEQNVELAAAELKADEKSHAVILGDTRYGSEEKGTY

SEQ ID NO: 72444 - protein, 246 aa, Neisseria meningitidis
VNRTTFCCLSLTAALILTACSSGGGGSGGGGVAADIGAGLADALTAPLDHKDKGLQSLTLDQSVRKNEKLKLAAQGAEKTYGNGDSLNTGKLKNDKISRFDFIRQIEVDGQLITLESGEFQVYKQSHSALTALQTEQVQDSEDSGKMVAKRQFRIGDIAGEHTSFDKLPEDVRATYRGTAFGSDDAGGKLIYTIDFAAKQGHGKIEHLKSPELNVDLAAADIKPDEKRHAVISGSVLYNQDEKGSY

SEQ ID NO: 72445 - protein, 248 aa, Neisseria meningitidis
VNRTAFCCLSLTAALILTACSSGGGGSGGGGVAADIGTGLADALTAPLDHKDKGLKSLTLEDSIPQNGTLTLSAQGAEKTFKAGDKDNSLNTGKLKNDKISRFDFVQKIEVDGQTITLASGEFQIYKQDHSAVVALQIEKINNPDKIDSLINQRSFLVSGLGGEHTAFNQLPGGKAEYHGKAFSSDDPNGRLHYSIDFTKKQGYGRIEHLKTPEQNVELASAELKADEKSHAVILGDTRYGSEEKGTY

SEQ ID NO: 72446 - protein, 248 aa, Neisseria meningitidis
VNRTTFCCLSLTAALILTACSSGGGGSGGGGVAADIGTGLADALTAPLDHKDKGLKSLTLEDSIPQNGTLTLSAQGAEKTFKAGDKDNSLNTGKLKNDKISRFDFVQKIEVDGQTITLASGEFQIYKQDHSAVVALQIEKINNPDKIDSLINQRSFLVSGLGGEHTAFNQLPGGKAEYHGKAFSSDDAGGKLTYTIDFAAKQGHGKIEHLKTPEQNVELASAELKADEKSHAVILGDTRYGSEEKGTY

SEQ ID NO: 72447 - protein, 241 aa, Neisseria meningitidis
VNRTAFCCLSLTTALILTACSSGGGGVAADIGAGLADALTAPLDHKDKGLQSLILDQSVRKNEKLKLAAQGAEKTYGNGDSLNTGKLKNDKVSRFDFIRQIEVDGQLITLESGEFQVYKQSHSALTALQTEQVQDSEHSGKMVAKRQFRIGDIAGEHTSFDKLPEGGRATYRGTAFSSDDAGGKLIYTIDFAAKQGHGKIEHLKSPELNVDLAAADIKPDEKHHAVISGSVLYNQAEKGSY

SEQ ID NO: 72448 - protein, 248 aa, Neisseria meningitidis
VNRTAFCCLFLTTALILTACSSGGGGSGSGGVAADIGTGLADALTTPLDHKDKGLKSLTLEDSIPQNGTLTLSAQGAEKTFKAGDKDNSLNTGKLKNDKISRFDFVQKIEVDGQTITLASGEFQIYKQDHSAVVALQIEKINNPDKIDSLINQRSFLVSGLGGEHTAFNQLPGGKAEYHGKAFSSDDAGGKLHYSIDFTKKQGYGRIEHLKTPEQNVELASAELKADEKSHAVILGDTRYGSEEKGTY

SEQ ID NO: 72449 - protein, 241 aa, Neisseria meningitidis
VNRTAFCCLSLTAALILTACSSGGGGVAADIGAGLADALTAPLDHKDKGLQSLMLDQSVRKNEKLKLAAQGAEKTYGNGDSLNTGKLKNDKISRFDFIRQIEVDGQLITLESGEFQVYKQSHSALTALQTEQVQDSEDSRKMVAKRQFRIGDIAGEHTSFDKLPESDRATYRGTAFSSDDAGGKLTYTIDFAAKQGHGKIEHLKSPELNVDLAAADIKPDEKRHAVISGSVLYNQDEKGSY

SEQ ID NO: 72450 - protein, 240 aa, Neisseria meningitidis
VNRTAFCCLSLTAALILTACSSGGGGVAADIGAGLADALTAPLDHKDKGLQSLTLDQSVRKNEKLKLAAQGAEKTYGNGDSLNTGKLKNDKVSRFDFIRQIEVDGKLITLESGEFQIYKQDHSAVVALQIEKINNPDKIDSLINQRSFLVSGLGGEHTAFNQLPGGKAEYHGKAFSSDDPNGRLHYSIDFTKKQGYGRIEHLKTPEQNVELASAELKADEKSHAVILGDTRYGGEEKGTY

SEQ ID NO: 72451 - protein, 241 aa, Neisseria meningitidis
VNRTTFCCLSLTAALILTACSSGGGGVAADIGAGLADALTAPLDHKDKGLQSLTLDQSVRKNEKLKLAAQGAEKTYGNGDRLNTGKLKNDKVSRFDFIRQIEVDGQLITLESGEFQVYKQSHSALTAFQTEQIQDSEHSGKMVAKRQFRIGDIAGEHTSFDKLPEGGRATYRGTAFGSDDAGGKLTYTIDFAAKQGNGKIEHLKSPELNVDLAAADIKPDEKRHAVISGSVLYNQAEKGSY

SEQ ID NO: 72452 - protein, 240 aa, Neisseria meningitidis; identical to SEQ ID NO: 72395

SEQ ID NO: 72453 - protein, 252 aa, Neisseria meningitidis
VNRTAFCCLFLTTALILTACSSGGGGSGGGSGGGGVAADIGTGLADALTAPLDHKDKGLKSLTLEDSIPQNGTLTLSAQGAEKTFKAGDKDNSLNTGKLKNDKISRFDFVQKIEVDGQTITLASGEFQIYKQDHSAVVALQIEKINNPDKIDSLINQRSFLVSGLGGEHTAFNQLPGGKAEYHGKAFSSDDPNGRLHYSIDFTKKQGYGRIEHLKTPEQNVELAAAELKADEKSHAVILGDTRYGSEEKGTY

SEQ ID NO: 72454 - protein, 243 aa, Neisseria meningitidis
VNRTAFCCLSLTAALILTACSSGGGGVAADIGAGLADVLTAQLDHKDKGLQSLTLDQSVRKNEKLKLAAQGAEKTFKAGDKDNSLNTGKLKNDKISRFDFIRQIEVDGQLITLESGEFQIYKQDHSAVVALQIEKINNPDKIDSLINQRSFLVSGLGGEHTAFNQLPDGKAEYHGKAFSSDDAGGKLTYTIDFAAKQGHGKIEHLKTPEQNVELAAAELKADEKSHAVILGDTRYGSEEKGTY

SEQ ID NO: 72455 - protein, 241 aa, Neisseria meningitidis
VNRTAFCCLSLTAALILTACSSGGGGVAADIGAGLADALTAPLDHKDKSLQSLTLDQSVRKNEKLKLAAQGAEKTYGNGDSLNTGKLKNDKVSRFDFIRQIEVDGQLITLESGEFQVYKQSHSALTALQTEQEQDPEHSGKMVAKRRFKIGDIAGEHTSFDKLPKDVMATYRGTAFGSDDAGGKLTYTIDFAAKQGHGKIEHLKSPELNVELATAYIKPDEKHHAVISGSVLYNQDEKGSY

SEQ ID NO: 72456 - protein, 240 aa, Neisseria meningitidis
VNRTAFCCLSLTAALILTACSSGGGGVAADIGAGLADALTAPLDHKDKSLQSLTLDQSVRKNEKLKLAAQGAEKTYGNGDSLNTGKLKNDKVSRFDFIRQIEVDGQLITLESGEFQIYKQDHSAVVALQIEKINNPDKTDSLINQRSFLVSGLGGEHTAFNQLPGGKAEYHGKAFSSDDPNGRLHYSIDFTKKQGYGRIEHLKTPEQNVELAAAELKADEKSHAVILGDTRYGSEEKGTY

SEQ ID NO: 72457 - protein, 241 aa, Neisseria meningitidis
VNRTAFCCLSLTAALILTACSSGGGGVAADIGAGLADALTAPLDHKDKSLQSLTLDQSVRKNEKLKLAAQGAEKTYGNGDSLNTGKLKNDKVSRFDFIRQIEVDGKLITLESGEFQVYKQSHSALTALQTEQVQDSEDSGKMVAKRQFRIGDIAGEHTSFDKLPKGGSATYRGTAFGSDDAGGKLTYTIDFAAKQGHGKIEHLKSPELNVELATAYIKPDEKRHAVISGSVLYNQDEKGSY

SEQ ID NO: 72458 - protein, 240 aa, Neisseria meningitidis
VNRTAFCCLSLTAALILTACSSGGGGVAADIGAGLADALTAPLDHKDKSLQSLTLDQSVRKNEKLKLAAQGAEKTYGNGDSLNTGKLKNDKVSRFDFIRQIEVDGQTITLASGEFQIYKQNHSAVVALQIEKINNPDKIDSLINQRSFLVSGLGGEHTAFNQLPGGKAEYHGKAFSSDDPNGRLHYSIDFTKKQGYGRIEHLKTPEQNVELASAELKADEKSHAVILGDTRYGSEEKGTY

SEQ ID NO: 72459 - protein, 240 aa, Neisseria meningitidis; identical to SEQ ID NO: 72395

SEQ ID NO: 72460 - protein, 240 aa, Neisseria meningitidis
VNRTAFCCLSLTAALILTACSSGGGGVAADIGAGLADALTAPLDHKDKSLQSLTLDQSVRKNEKLKLAAQGAEKTYGNGDSLNTGKLKNDKVSRFDFIRQIEVDGQLITLESGEFQIYKQDHSAVVALQIEKINNPDKIDSLINQRSFLVSGLGGEHTAFNQLPGGKAEYHGKAFSSDDPNGRLHYSIDFTKKQGYGRIEHLKTPEQNVELASAELKADEKSHAVILGDTRYGGEEKGTY

SEQ ID NO: 72461 - protein, 240 aa, Neisseria meningitidis
VNRTAFCCLSLTAALILTACSSGGGGVAADIGAGLADALTAPLDHKDKGLQSLMLDQSVRKNEKLKLAAQGAEKTYGNGDSLNTGKLKNDKISRFDFIRQIEVDGQLITLESGEFQIYKQDHSAVVALQIEKINNPDKIDSLINQRSFLVSGLGGEHTAFNQLPDGKAEYHGKAFSSDDAGGKLTYTIDFAAKQGHGKIEHLKTPEQNVELAAAELKADEKSHAVILGDTRYGSEEKGTY

SEQ ID NO: 72462 - protein, 243 aa, Neisseria meningitidis
VNRTAFCCLSLTAALILTACSSGGGGVAADIGAGLADALTAPLDHKDKGLKSLTLEDSIPQNGTLTLSAQGAEKTFKAGDKDNSLNTGKLKNDKISRFDFVQKIEVDGQTITLASGEFQIYKQDHSAVVALQIEKINNPDKIDSLINQRSFLVSGLGGEHTAFNQLPGGKAEYHGKAFSSDDPNGRLHYSIDFTKKQGYGRIEHLKTPEQNVELASAELKADEKSHAVILGDTRYGGEEKGTY

SEQ ID NO: 72463 - protein, 241 aa, Neisseria meningitidis
VNRTAFCCLSLTAALILTACSSGGGGVAADIGAGLADALTAPLDHKDKGLQSLTLDQSVRKNEKLKLAAQGAEKTYGNGDSLNTGKLKNDKVSRFDFIRQIEVDGKLITLESGEFQVYKQSHSALTALQTEQVQDSEDSGKMVAKRQFRIGDIAGEHTSFDKLPKGGSATYRGTAFGSDDAGGKLTYTIDFAAKQGHGKIEHLKSPELNVELATAYIKPDEKRHAVISGSVLYNQDEKGSY

SEQ ID NO: 72464 - protein, 241 aa, Neisseria meningitidis
VNRTAFCCFSLTAALILTACSSGGGGVAADIGAGLADALTAPLDHKDKSLQSLTLDQSVRKNEKLKLAAQGAEKTYGNGDSLNTGKLKNDKVSRFDFIRQIEVDGKLITLESGEFQVYKQSHSALTALQTEQVQDSEDSGKMVAKRQFRIGDIAGEHTSFDKLPKGGSATYRGTAFGSDDAGGKLTYTIDFAAKQGHGKIEHLKSPELNVELATAYIKPDEKRHAVISGSVLYNQDEKGSY

SEQ ID NO: 72465 - protein, 243 aa, Neisseria meningitidis; identical to SEQ ID NO: 72454

SEQ ID NO: 72466 - protein, 241 aa, Neisseria meningitidis
VNRTAFCCLSLTTALILTACSSGGGGVAADIGAGLADALTAPLDHKDKGLQSLTLDQSVRKNEKLKLAAQGAEKTYGNGDSLNTGKLKNDKVSRFDFIRQIEVDGQLITLESGEFQVYKQSHSALTAFQTEQIQDSEHSGKMVAKRQFRIGDIAGEHTSFDKLPEGGRATYRGTAFGSDDAGGKLTYTIDFAVKQGHGKIEHLKSPELNVELATAYIKPDEKHHAVISGSVLYNQDEKGSY

SEQ ID NO: 72467 - protein, 246 aa, Neisseria meningitidis
VNRTTFCCLSLTAALILTACSSGGGGSGGGGVAADIGAGLADALTAPLDHKDKGLQSLTLDQSVRKNEKLKLAAQGAEKTYGNGDSLNTGKLKNDKVSRFDFIRQIEVDGQLITLESGEFQVYKQSHSALTALQTEQVQDSEDSGKMVAKRQFRIGDIAGEHTSFDKLPKDVMATYRGTAFGSDDAGGKLTYTIDFAAKQGHGKIEHLKSPELNVDLAVAYIKPDEKHHAVISGSVLYNQDEKGSY

SEQ ID NO: 72468 - protein, 241 aa, Neisseria meningitidis
VNRTAFCCLSLTAALILTACSSGGGGVAADIGAGLADALTAPLDHKDKSLQSLTLDQSVRKNEKLKLAAQGAEKTYGNGDSLNTGKLKNDKVSRFDFIRQIEVDGQLITLESGEFQVYKQSHSALTALQTEQVQDSEDSRKMVAKRQFRIGDIAGEHTSFDKLPESDRATYRGTAFSSDDAGGKLTYTIDFAAKQGHGKIEHLKSPELNVDLAAADIKPDEKRHAVISGSVLYNQDEKGSY

SEQ ID NO: 72469 - protein, 252 aa, Neisseria meningitidis
VNRFGFCCLFLTTALILTACSSGGGGSGGGSRGGGIAADIGTGLADALTAPLDHKDKGLKSLTLEDSIPQNGTLTLSAQGAEKTFKAGDKDNSLNTGKLKNDKISRFDFVQKIEVDGQTITLASGEFQIYKQDHSAVVALQIEKINNPDKIDSLINQRSFLVSGLGGEHTAFNQLPGGKAEYHGKAFSSDDAGGKLTYTIDFAAKQGHGKIEHLKTPEQNVELAAAELKADEKSHAVILGDTRYGSEEKGTY

SEQ ID NO: 72470 - protein, 241 aa, Neisseria meningitidis
VNRTAFCCLSLTAALILTACSSGGGGVAADIGAGLADALTTPLDHKDKSLQSLTLDQSVRKNEKLKLAAQGAEKTYGNGDSLNTGKLKNDKVSRFDFIRQIEVDGKLITLESGEFQVYKQSHSALTALQTEQVQDSEDSGKMVAKRQFRIGDIAGEHTSFDKLPKGGSATYRGTAFGSDDAGGKLTYTIDFAAEQGHGKIEHLKSPELNVELATAYIKPDEKRHAVISGSVLYNQDEKGSY

SEQ ID NO: 72471 - protein, 241 aa, Neisseria meningitidis; identical to SEQ ID NO: 72380

SEQ ID NO: 72472 - protein, 242 aa, Neisseria meningitidis
VNRTTFCCLSLTAALILTACSSGSGGGGVAADIGTGLAYALTAPLDHKDKSLQSLTLDQSVRKNEKLKLAAQGAEKTYGNGDSLNTGKLKNDKVSRFDFIRQIEVDGQLITLESGEFQIYKQDHSAVVALQIEKINNPDKIDSLINQRSFLVSGLGGEHTAFNQLPGGKAEYHGKAFSSDDPNGRLHYSIDFTKKQGYGRIEHLKTPEQNVELASAELKADEKSHAVILGDTRYGGEEKGTY

SEQ ID NO: 72473 - protein, 241 aa, Neisseria meningitidis; identical to SEQ ID NO: 72449

SEQ ID NO: 72474 - protein, 241 aa, Neisseria meningitidis; identical to SEQ ID NO: 72392

SEQ ID NO: 72475 - protein, 241 aa, Neisseria meningitidis
VNRTAFCYLSLTTALILTACSSGGGGVAADIGAGLADALTAPFDHKDKGLQSLTLDQSVRKNEKLKLAAQGAEEIYGNGDSLDTGKLKNDKVSRFDFIRQIEVDGQLITLESGEFQVYKQSHSALTALQTEQVQDSEHSRKMVAKRQFRIGDIAGEHTSFDKLPEGGRATYRGTALGSDDAGGKLIYTIDFAAKQGHGKIEHLKSPELNVDLAAAYIKPDEKHHAVISGSVLYNQAEKGSY

SEQ ID NO: 72476 - protein, 241 aa, Neisseria meningitidis
VNRTAFCCLSLTTALILTACSSGGGGVTADIGTGLADALTAPLDHKDKGLQSLTLDQSVRKNEKLKLAAQGAEKTYGNGDSLNTGKLKNDKISRFDFIRQIEVDGQLITLESGEFQVYKQSHSALTALQTEQVQDSEHSGKMVAKRQFRIGDIAGEHTSFDKLPKGGSATYRGTAFGSDDAGGKLTYTIDFAAKQGHGKIEHLKSPELNVELATAYIKPDEKRHAVISGSVLYNQDEKGSY

SEQ ID NO: 72477 - protein, 241 aa, Neisseria meningitidis
VNRTAFCCFSLTAALILTACSSGGGGVAADIGAGLADALTAPLDHKDKGLQSLTLDQSVRKNEKLKLAAQGAEKTYGNGDSLNTGKLKNDKVSRFDFIRQIEVDGKLITLESGEFQVYKQSHSALTALQTEQVQDSEDSGKMVAKRQFRIGDIAGEHTSFDKLPKGGSATYRGTAFGSDDAGGKLTYTIDFAAKQGHGKIEHLKSPELNVDLAAADIKPDEKHHAVISGSVLYNQAEKGSY

SEQ ID NO: 72478 - protein, 245 aa, Neisseria meningitidis
VNRTAFCCLSLTAALILTACSSGSGGGGVAADIGTGLADALTAPLDHKDKGLKSLTLEDSIPQNGTLTLSAQGAEKTFKAGDKDNSLNTGKLKNDKISRFDFVQKIEVDGQTITLASGEFQIYKQNHSAVVALQIEKINNPDKIDSLINQRSFLVSGLGGEHTAFNQLPGGKAEYHGKAFSSDDPNGRLHYTIDFTNKQGYGRIEHLKTPELNVDLASAELKADEKSHAVILGDTRYGSEEKGTY

SEQ ID NO: 72479 - protein, 249 aa, Neisseria meningitidis
VNRTTFCCLSLTAALILTACSSGGGGSGGGGVAADIGAGLADALTAPLDHKDKGLKSLTLEDSISQNGTLTLSAQGAERTFKAGDKDNSLNTGKLKNDKISRFDFIRQIEVDGQLITLESGEFQVYKQSHSALTALQTEQVQDSEHSGKMVAKRQFRIGDIVGEHTSFGKLPKDVMATYRGTAFGSDDAGGKLTYTIDFAAKQGHGKIEHLKSPELNVDLAAADIKPDEKRHAVISGSVLYNQAEKGSY

SEQ ID NO: 72480 - protein, 241 aa, Neisseria meningitidis
VNRTAFCCLSLTAALILTACSSGGGGVAADIGAGLADALTAPLDHKDKGLQSLTLDQSVRKKEKLKLAAQGAEKTYGNGDSLNTGKLKNDKVSRFDFIRQIEVDGQLITLESGEFQVYKQSYSALTALQTEQEQDSEHSGKMVAKRRFRIGDIAGEHTSFDKLPKGSSATYRGTAFGSDDAGGKLTYTIDFAAKQGYGKIEHLKSPELNVDLAAADIKPDEKRHAVISGSVLYNQAEKGSY

SEQ ID NO: 72481 - protein, 241 aa, Neisseria meningitidis
VNRTAFCCFSLTAALILTACSSGGGGVAADIGAGLADALTAPLDHKDKGLQSLTLDQSVRKNEKLKLAAQGAEKTYGNGDSLNTGKLKNDKVSRFDFIRQIEVDGKLITLESGEFQVYKQSHSALTALQTEQVQDSEDSGKMVAKRQFRIGDIAGEHTSFDKLPKGGSATYRGTAFGSDDAGGKLTYTIDFAAKQGHGKIEHLKSPELNVDLAAAYIKPDEKHHAVISGSVLYNQAEKGSY

SEQ ID NO: 72482 - protein, 248 aa, Neisseria meningitidis
VNRTAFCCLFLTTTLILTACSSGGGGSGSGGVAADIGTGLADALTTPLDHKDKGLKSLTLEDSIPQNGTLTLSAQGAEKTFKAGDKDNSLNTGKLKNDKISRFDFVQKIEVDGQTITLASGEFQIYKQDHSAVVALQIEKINNPDKIDSLINQRSFLVSGLGGEHTAFNQLPGGKAEYHGKAFSSDDAGGKLTYTIDFAAKQGHGKIEHLKTPEQNVELAAAELKADEKSHAVILGDTRYGSEEKGTY

SEQ ID NO: 72483 - protein, 243 aa, Neisseria meningitidis
VNRTTFCCLSLTAALILTACSSGGGGVAADIGAGLADALTAPLDHKDKGLKSLTLEDSISQNGTLTLSAQGAEKTFKVGDKDNSLNTGKLKNDKISRFDFVQKIEVDGQTITLASGEFQIYKQNHSAVVALQIEKINNPDKIDSLINQRSFLVSGLGGEHTAFNQLPGGKAEYHGKAFSSDDAGGKLTYTIDFAAKQGHGKIEHLKTPEQNVELAAAELKADEKSHAVILGDTRYGSEEKGTY

SEQ ID NO: 72484 - protein, 245 aa, Neisseria meningitidis
VNRTTCCCLSLTAALILTACSSGGGGSGGGGVTADIGTGLADALTAPLDHKDKGLQSLTLDQSVRKNEKLKLAAQGAEKTYGNGDSLNTGKLKNDKVSRFDFIRQIEVDGQLITLESGEFQIYKQDHSAVVALQIEKINNPDKIDSLINQRSFLVSGLGGEHTAFNQLPGGKAEYHGKAFSSDDPNGRLHYSIDFTKKQGYGRIEHLKTPEQNVELASAELKADEKSHAVILGDTRYGGEEKGTY

SEQ ID NO: 72485 - protein, 241 aa, Neisseria meningitidis
VNRTAFCCLSLTTALILTACSSGGGGVAADIGAGLADALTAPLDHKDKGLQSLTLDQSVRKNEKLKLAAQGAEKTYGNGDSLNTGKLKNDKVSRFDFIRQIEVDGQLITLESGEFQVYKQSHSALTALQTEQVQDSEHSGKMVAKRQFRIGDIAGEHTSFDKLPEGGRTTYRGTAFGSDDAGGKLIYTIDFAAKQGHGKIEHLKSPELNVDLAAAYIKPDEKRHAVISGSVLYNQDEKGSY

SEQ ID NO: 72486 - protein, 240 aa, Neisseria meningitidis
VNRTAFCCLSLTAALILTACSSGGGGVAADIGAGLADALTAPLDHKDKSLQSLTLDQSVRKNEKLKLAAQGAEKTYGNGDSLNTGKLKNDKVSRFDFIRQIEVDGQLITLESGEFQIYKQDHSAVVALQIEKINNPDKIDSLINQRSFLVSGLVGEHTAFNQLPDGKAEYHGKAFSSDDAGGKLTYTIDFAAKQGHGKIEHLKTPEQNVELAAAELKADEKSHAVILGDTRYGSEEKGTY

SEQ ID NO: 72487 - protein, 241 aa, Neisseria meningitidis
VNRTAFCCLSLTAALILTACSSGGGGVAADIGAGLADALTAPLDHKDKGLQSLTLDQSVRKNEKLKLAAQGAEETYGNGDSLNTSKLKNDKVSRFDFIRQIEVDGQLITLESGEFQVYKQSHSALTALQTEQVQDSEHSGKMVAKRQFRIGDIAGEHTSFDKLPKGGRATYRGTAFGSDDAGGKLTYTIDFASKQGHGKIEHLKSPELNVDLAAADIKPDEKHHAVISGSVLYNQAEKGSY

SEQ ID NO: 72488 - protein, 243 aa, Neisseria meningitidis; identical to SEQ ID NO: 72483

SEQ ID NO: 72489 - protein, 240 aa, Neisseria meningitidis
VNRTAFCCLSLTAALILTACSSGGGGVAADIGAGLADALTAPLDHKDKSLQSLTLDQSVRKNEKLKLAAQGAEKTYGNGDSLNTGKLKNDKVSRFDFIRQIEVDGQLITLESGEFQIYKQDHSAVVALQIEKINNPDKIDSLINQRSFLVSGLGGEHTAFNQLPDGKAEYHGKAFSSDDAGGKLTYTIDFAAKQGHGKIEHLKTPEQNVELASAELKADEKSHAVILGDTRYGGEEKGTY

SEQ ID NO: 72490 - protein, 248 aa, Neisseria meningitidis
VNRTAFCCLFLTTTLILTACSSGGGGSGSGGVAADIGTGLADALTTPLDHKDKGLKSLTLEDSIPQNGTLTLSAQGAEKTFKAGDKDNSLNTGKLKNDKISRFDFVQKIEVDGQTITLASGEFQIYKQDHSAVVALQIEKINNPDKIDSLINQRSFLVSGLGGEHTAFNQLPGGKAEYHGKAFSSDDAGGKLTYTIDFAAKQGNGKIEHLKTPEQNVELAAAELKADEKSHAVILGDTRYGSEEKGTY

SEQ ID NO: 72491 - protein, 240 aa, Neisseria meningitidis
VNRTAFCCLSLTAALILTACSSGGGGVAADIGAGLADALTAPLDHKDKSLQSLTLDQSVRKNEKLKLAAQGAEKTYGNGDSLNTGKLKNDKVSRFDFIRQIEVDGQLITLESGEFQIYKQDHSAVVALQIEKINNPDKIDSLINQRSFLVSGLGGEHTAFNQLPSGKAEYHGKAFSSDDAGGKLTYTIDFAAKQGHGKIEHLKTPEQNVELAAAELKADEKSHAVILGDTRYGGEEKGTY

SEQ ID NO: 72492 - protein, 241 aa, Neisseria meningitidis
VNRTAFCCFSLTAALILTACSSGGGGVAADIGAGLADALTAPLDHKDKGLQSLTLDQSVRKNEKLKLAAQGAKKTYGNGDSLNTGKLKNDKVSRFDFIRQIEVDGKLITLESGEFQVYKQSHSALTALQTEQVQDSEDSGKMVAKRQFRIGDIAGEHTSFDKLPKGGSATYRGTAFGSDDAGGKLTYTIDFAAKQGHGKIEHLKSPELNVELATAYIKPDEKRHAVISGSVLYNQDEKGSY

SEQ ID NO: 72493 - protein, 240 aa, Neisseria meningitidis
VNRTAFCCLSLTAALILTACSSGGGGVAADIGAGLADALTAPLDHKDKSLQSLTLDQSVRKNEKLKLAAQGAEKTYGNGDSLNTGKLKNDKVSRFDFIRQIEVDGQTITLASGEFQIYKQNHSAVVALQIEKINNPDKIDSLINQRSFLVSGLGGEHTAFNQLPDGKAEYHGKAFSSDDAGGKLTYTIDFAAKQGNGKIEHLKTPEQNVELAAAELKADEKSHAVILGDTRYGSEEKGTY

SEQ ID NO: 72494 - protein, 241 aa, Neisseria meningitidis
VNRTAFCCLSLTAALILTACSSGGGGVAADIGAGLADALTAPLDHKDKSLQSLTLDQSVRKNEKLKLAAQGAEKTYGNGDSLNTGKLKNDKVSRFDFIRQIEVDGQLITLESGEFQVYKQSHSALTALQTEQVQDSEHSEKMVAKRQFRIGDIAGEHTSFDKLPKDVMVTYRGTAFSSDDAGGKLIYTIDFAAKQGHGKIEHLKSPELNVDLAAAYIKPDEKHHAVISGSALYNQDEKGSY

SEQ ID NO: 72495 - protein, 246 aa, Neisseria meningitidis
VNRTAFCCLSLTTALILTACSSGGGGSGGGGVAADIGTGLADALTAPLDHKDKGLQSLTLDQSVRKNEKLKLAAQGAEKTYGNGDSLNTGKLKNDKVSRFDFIRQIEVDGQLITLESGEFQVYKQSHSALTALQTEQVQDSEHSGKMVAKRQFRIGDIAGEHTSFDKLPEGGRATYRGTAFGSDDASGKLTYTIDFAAKQGHGKIEHLKSPELNVDLAASDIKPDKKRHAVISGSVLYNQAEKGSY

SEQ ID NO: 72496 - protein, 241 aa, Neisseria meningitidis
VNRTAFCCLSLTTALILTACSSGGGGVAADIGAGLADALTAPLDHKDKGLQSLMLDQSVRKNEKLKLAAQGAEKTYGNGDSLNTGKLKNDKVSRFDFIRQIEVDGQLITLESGEFQVYKQSHSALTALQTEQVQDSEHSGSMVAKRQFRIGDIAGEHTSFDKLPEGGRATYRGTAFGSDDAGGKLIYTIDFAAKQGHGKIEHLKSPELNVDLAAAYIKPDEKHHAVISGSVLYNQAEKGSY

SEQ ID NO: 72497 - protein, 241 aa, Neisseria meningitidis
VNRTAFCCLSLTTALILTACSSGGGGVAADIGAGLADALTAPLDHKDKGLQSLMLDQSVRKNEKLKLAAQGAEKTYGNGDSLNTGKLKNDKVSRFDFIRQIEVDGQLITLESGEFQVYKQSHSALTALQTEQVQDSEDSGKMVAKRQFRIGDIAGEHTSFDKLPKGGSATYRGTAFGSDDAGGKLTYTIDFAAKQGHGKIEHLKSPELNVELAAAYIKPDEKRHAVISGSVLYNQDEKGSY

SEQ ID NO: 72498 - protein, 239 aa, Neisseria meningitidis
VNRTAFCCLSLTTALILTACSSGGGGVAADIGAGLADALTAPLDHKDKGLQSLMLDQSVRKNEKLKLAAQGAEKTYGNGDSLNTGKLKNDKVSRFDFIRQIEVDGQLITLESGEFQVYKQSHSALTALQTEQVLGAFGKMVAKRQFRIGDIAGEHTSFDKLPEGGRATYRGTAFGSDDAGGKLIYTIDFAAKQGHGKIEHLKSPELNVDLAAAYIKPDEKHHAVISGSVLYNQAEKGSY

SEQ ID NO: 72499 - protein, 241 aa, Neisseria meningitidis
VNRTAFCCFSLTAALILTACSSGGGGVAADIGAGLADALTAPLDHKDKGLQSLTLDQSVRKNEKLKLAAQGAEKTYGNGDSLNTGKLKNDKVSRFDFIRQIEVDGKLITLESGEFQVYKQSHSALTALQTEQVQDSEDSGKMVAKRQFRIGDIAGEHTSFDKLPKGGSATYRGTAFGSDDAGGKLTYTIDFAAKQGHGKIEHLKSPELNVELATAYIKPDEKRHAVIRGSVLYNQDEKGSY

SEQ ID NO: 72500 - protein, 241 aa, Neisseria meningitidis
VNRTAFCCLSLTTALILTACSSGGGGVAADIGAGLADALTAPLDHKDKGLQSLTLDQSVRKNEKLKLAAQGAEKTYGNGDSLNTGKLKNDKVSRFDFIRQIEVDGQLITLESGEFQVYKQSHSALTALQTEQVQDSEHSGKMVAKRQFRIGDIAGEHTSFDKLPKGGRATYRGTAFGSDDAGGKLTYTIDFAAKQGHGKIEHLKSPELNVDLAAADIKPDEKHHAIISGSVLYNQDEKGSY

SEQ ID NO: 72501 - protein, 241 aa, Neisseria meningitidis
VNRTTFCCLSLTTALILTACSSGGGGVAADIGAGLADALTAPLDHKDKGLQSLTLDQSVRKNEKLKLAAQGAEKTYGNGDSLNTGKLKNDKVSRFDFIRQIEVDGQLITLESGEFQVYKQSHSALTALQTEQVQDSEHSGKMVAKRQFRIGDIAGEHTSFDKLPEGVRATYRGTAFGSDDAGGKLTYTIDFAAKQGHGKIEHLKSPELNVDLAAADIKPDEKHHAVISGSVLYNQDEKGSY

SEQ ID NO: 72502 - protein, 246 aa, Neisseria meningitidis
VNRTAFCCLSLTAALILTACSSGGGGSGGGGVAADIGTGLADALTAPLDHKDKGLQSLTLDQSVRKNEKLKLAAQGAEKTYGNGDSLNTGKLKNDKVSRFDFIHQIEVDGQLITLESGEFQVYKQSHSALTALQTEQEQDPEHSGKMVAKRRFKIGDIAGEHTSFDKLPKDVMATYRGTAFGSDDAGGKLTYTIDFAAKQGHGKIEHLKSPELNVELATAYIKPDEKHHAVISGSVLYNQDEKGSY

SEQ ID NO: 72503 - protein, 241 aa, Neisseria meningitidis
VNRTTFCCLSLTAALILTACSSGGGGVAADIGAGLADALTAPLDHKDKGLQSLTLDQSVRKNEKLKLAAQGAEKTYGNGDRLNTGKLKNDKVSRFDFIRQIEVDGQLITLESGEFQVYKQSHSALTAFQTEQIQDSEDSGKMVAKRRFRIGDIAGEHTSFDKLPKGGSATYRGTAFGSDDAGGKLTYTIDFAVKQGHGKIEHLKSPELNVELATADIKPDEKHHAVISGSVLYNQDEKGSY

SEQ ID NO: 72504 - protein, 240 aa, Neisseria meningitidis
VNRTAFCCLSLTTALILTACSSGGGGVAADIGAGLADALTAPLDHKDKGLQSLMLDQSVRKNEKLKLAAQGAEKTYGNGDSLNTGKLKNDKVSRFDFIRQIEVDGKLITLESGEFQIYKQDHSAVVALQIEKINNPDKIDSLINQRSFLVSGLGGEHTAFNQLPSGKAEYHGKAFSSDDAGGKLTYTIDFAAKQGHGKIEHLKTPEQNVELASAELKADEKSHAVILGDTRYGGEEKGTY

SEQ ID NO: 72505 - protein, 240 aa, Neisseria meningitidis
VNRTAFCCLSLTTALILTACSSGGGGVAADIGAGLADALTAPLDHKDKGLQSLTLDQSVRKNEKLKLAAQGAEKTYGNGDSLNTGKLKNDKVSRFDFIRQIEVDGQLITLESGEFQIYKQDHSAVVALQIEKINNPDKIDSLINQRSFLVSGLGGEHTAFNQLPSGKAEYHGKAFSSDDPNGRLHYSIDFTKKQGYGRIEHLKTPEQNVELASAELKADEKSHAVILGDTRYGGEEKGTY

SEQ ID NO: 72506 - protein, 246 aa, Neisseria meningitidis
VNRTAFCCLFLTTALILTACSSGGGGSGGGGVAADIGTGLADALTAPLDHKDKGLQSLTLDQSVRKNEKLKLAAQGAEKTYGNGDSLNTGKLKNDKVSRFDFIHQIEVDGQLITLESGEFQVYKQSHSALTALQTEQEQDPEHSGKMVAKRRFKIGDIAGEHTSFDKLPKDVMATYRGTAFGSDDAGGKLTYTIDFAAKQGHGKIEHLKSPELNVELATAYIKPDEKHHAVISGSVLYNQDEKGSY

SEQ ID NO: 72507 - protein, 246 aa, Neisseria meningitidis
VNRTTCCCLSLTAALILTACSSGGGGSGGGGVAADIGTGLADALTAPLDHKDKGLQSLTLDQSVRKNEKLKLAAQGAEKTYGNGDSLNTGKLKNDKISRFDFIRQIEVDGQLITLESGEFQVYKQSHSALTALQTEQVQDSEDSGKMVAKRQFRIGDIAGEHTSFDNLPKGGSATYRGTAFSSDDAGGKLTYTIDFAAKQGHGKIEHLKSPELNVELATAYIKPDEKHHAVISGSVLYNQDEKGSY

SEQ ID NO: 72508 - protein, 240 aa, Neisseria meningitidis
VNRTAFCCLSLTTALILTACSSGGGGVAADIGAGLADALTAPLDHKDKSLQSLTLDQSVRKNEKLKLAAQGAEKTYGNGDSLNTGKLKNDKVSRFDFIRQIEVDGQLITLESGEFQIYKQDHSAVVALQIEKINNPDKIDSLINQRSFLVSGLGGEHTAFNQLPSGKAEYHGKAFSSDDAGGKLTYTIDFAAKQGHGKIEHLKTPEQNVELASAELKADEKSHAVILGDTRYGGEEKGTY

SEQ ID NO: 72509 - protein, 240 aa, Neisseria meningitidis
VNRTAFCCLSLTAALILTACSSGGGGVAADIGAGLADALTTPLDHKDKSLQSLTLDQSVRKNEKLKLAAQGAEKTYGNGDNLNTGKLKNDKVSRFDFIRQIEVDGQTITLASGEFQIYKQNHSAVVALQIEKINNPDKIDSLINQRSFLVSGLGGEHTAFNQLPDGKAEYHGKAFSSDDPNGRLHYSIDFTKKQGYGRIEHLKTPEQNVELASAELKADEKSHAVILGDTRYGGEEKGTY

SEQ ID NO: 72510 - protein, 249 aa, Neisseria meningitidis
VNRTTFCCLSLTAALILTACSSGGGGSGGGGVAADIGAGLADALTAPLDHKDKGLKSLTLEDSISQNGTLTLSAQGAERTFKAGDKDNSLNTGKLKNDKISRFDFIRQIEVDGQLITLESGEFQVYKQSHSALTALQTEQVQDSEHSGKMVAKRQFRIGDIVGEHTSFGKLPKDVMATYRGTAFGSDDAGGKLTYTIDFAAKQGHGKIEHLKSPELNVELATAYIKPDEKHHAVISGSVLYNQDEKGSY

SEQ ID NO: 72511 - protein, 240 aa, Neisseria meningitidis
VNRTAFCCLSLTTALILTACSSGGGGVAADIGAGLADALTAPLDHKDKSLQSLTLDQSVRKNEKLKLAAQGAEKTYGNGDSLNTGKLKNDKVSRFDFIRQIEVDGQLITLESGEFQIYKQDHSAVVALQIEKINNPDKIDSLINQRSFLVSGLGGEHTAFNQLPDGKAEYHGKAFSSDDAGGKLTYTIDFAAKQGHGKIEHLKTPEQNVELAAAELKADEKSHAVILGDTRYGSEEKGTY

SEQ ID NO: 72512 - protein, 249 aa, Neisseria meningitidis
VNRTTFCCLSLTAALILTACSSGGGGSGGGGVAADIGAGLADALTAPLDHKDKGLKSLTLEDSISQNGTLTLSAQGAERTFKAGDKDNSLNTGKLKNDKISRFDFIRQIEVDGQLITLESGEFQVYKQSHSALTALQTEQVQDSEHSGKMVAKRQFRIGDIVGEHTSFDKLPKDVMATYRGTAFGSDDAGGKLTYTIDFAAKQGHGKIEHLKSPELNVDLAAADIKPDEKHHAVISGSVLYNQAEKGSY

SEQ ID NO: 72513 - protein, 248 aa, Neisseria meningitidis
VNRTAFCCLFLTTALILTACSSGGGGSGSGGVAADIGTGLADALTTPLDHKDKGLKSLTLEDSIPQNGTLTLSAQGAEKTFKAGDKDNSLNTGKLKNDKISRFDFVQKIEVDGQTITLASGEFQIYKQDHSAVVALQIEKINNPDKIDSLINQRSFLVSGLGGEHTAFNQLPSGKAEYHGKAFSSDDAGGKLTYTIDFAAKQGHGKIEHLKTPEQNVELASAELKADEKSHAVILGDTRYGSEEKGTY

SEQ ID NO: 72514 - protein, 241 aa, Neisseria meningitidis; identical to SEQ ID NO: 72449

SEQ ID NO: 72515 - protein, 245 aa, Neisseria meningitidis
VNRTAFCCLFLTTALILTACSSGGGGSGGGGVAADIGVGLADALTTPLDHKDKGLQSLTLDQSVRKNEKLKLAAQGAEKTYGNGDSLNTGKLKNDKVSRFDFIRQIEVDGQLITLESGEFQIYKQDHSAVVALQIEKINNPDKIDSLINQRSFLVSGLGGEHTAFNQLPGGKAEYHGKAFSSDDPNGRLHYSIDFTKKQGYGRIEHLKTPEQNVELASAELKADEKSHAVILGDTRYGGEEKGTY

SEQ ID NO: 72516 - protein, 221 aa, Neisseria meningitidis
CSSGGGGVAADIGAGLADALTAPLDHKDKSLQSLTLDQSVRKNEKLKLAAQGAEKTYGNGDSLNTGKLKNDKVSRFDFIRQIEVDGQTITLASGEFQIYKQNHSAVVALQIEKINNPDKIDSLINQRSFLVSGLGGEHTAFNQLPDGKAEYHGKAFSSDDPNGRLHYSIDFTKKQGYGRIEHLKTPEQNVELASAELKADEKSHAVILGDTRYGGEEKGTY

SEQ ID NO: 72517 - protein, 221 aa, Neisseria meningitidis
CSSGGGGVAADIGAGLADALTAPLDHKDKSLQSLTLDQSVRKNEKLKLAAQGAEKTYGNGDSLNTGKLKNDKVSRFDFIRQIEVDGQLITLESGEFQIYKQDHSAVVALQIEKINNPDKIDSLINQRSFLVSGLGGEHTAFNQLPGGKAEYHGKAFSSDDPNGRLHYSIDFTKKQGYGRIEHLKTPEQNVELASAELKADEKSHAVILGDTRYGSEEKGTY

SEQ ID NO: 72518 - protein, 222 aa, Neisseria meningitidis
CSSGGGGVAADIGAGLADALTAPLDHKDKGLQSLMLDQSVRKNEKLKLAAQGAEKTYGNGDSLNTGKLKNDKVSRFDFIHQIEVDGQLITLESGEFQVYKQSHSALTALQTEQEQDPEHSGKMVAKRRFKIGDIAGEHTSFDKLPKDVMATYRGTAFGSDDAGGKLTYTIDFAAKQGHGKIEHLKSPELNVELATAYIKPDEKHHAVISGSVLYNQDEKGSY

SEQ ID NO: 72519 - protein, 222 aa, Neisseria meningitidis
CSSGGGGVAADIGAGLADALTAPLDHKDKGLQSLTLDQSVRKNEKLKLAAQGAEKTYGNGDSLNTGKLKNDKVSRFDFIRQIEVDGQLITLESGEFQVYKQSHSALTAFQTEQIQDSEHSGKMVAKRRFRIGDIAGEHTSFDKLPEGGRATYRGTAFGSDDAGGKLTYTIDFAAKQGHGKIEHLKSPELNVDLAAADIKPDEKHHAVISGSVLYNQDEKGSY

SEQ ID NO: 72520 - protein, 222 aa, Neisseria meningitidis
CSSGGGGVAADIGAGLADALTAPLDHKDKSLQSLTLDQSVRKNEKLKLAAQGAEKTYGNGDSLNTGKLKNDKVSRFDFIRQIEVDGKLITLESGEFQVYKQSHSALTALQTEQVQDSEDSGKMVAKRQFRIGDIAGEHTSFDKLPKGGSATYRGTAFGSDDAGGKLTYTIDFAAKQGHGKIEHLKSPELNVELATAYIKPDEKRHAVISGSVLYNQDEKGSY

SEQ ID NO: 72521 - protein, 221 aa, Neisseria meningitidis
CSSGGGGVAADIGAGLADALTTPLDHKDKSLQSLTLDQSVRKNEKLKLAAQGAEKTYGNGDSLNTGKLKNDKVSRFDFIRQIEVDGQTITLASGEFQIYKQNHSAVVALQIEKINNPDKIDSLINQRSFLVSGLGGEHTAFNQLPDGKAEYHGKAFSSDDPNGRLHYSIDFTKKQGYGRIEHLKTPEQNVELASAELKADEKSHAVILGDTRYGGEEKGTY

SEQ ID NO: 72522 - protein, 222 aa, Neisseria meningitidis
CSSGGGGVAADIGAGLADALTAPLDHKDKGLQSLTLDQSVRKNEKLKLAAQGAEKTYGNGDSLNTGKLKNDKVSRFDFIRQIEVDGQLITLESGEFQVYKQSHSALTALQTEQVQDSEDSGKMVAKRQFRIGDIAGEHTSFDKLPKGGSATYRGTAFSSDDAGGKLTYTIDFAAKQGHGKIEHLKSPELNVELATAYIKPDEKRHAVISGSVLYNQDEKGSY

SEQ ID NO: 72523 - protein, 227 aa, Neisseria meningitidis
CSSGGGGSGGGGVAADIGAGLADALTAPLDHKDKGLQSLTLDQSVRKNEKLKLAAQGAEKTYGNGDSLNTGKLKNDKVSRFDFIRQIEVDGQLITLESGEFQVYKQSHSALTALQTEQEQDLEHSGKMVAKRRFRIGDIAGEHTSFDKLREGGRATYRGTAFGSDDAGGKLTYTIDFAAKQGYGKIEHLKSPELNVDLAAADIKPDEKRHAVISGSVLYNQDEKGSY

SEQ ID NO: 72524 - protein, 222 aa, Neisseria meningitidis
CSSGGGGVAADIGAGLADALTAPLDHKDKSLQSLTLDQSVRKNEKLKLAAQGAEKTYGNGDSLNTGKLKNDKVSRFDFIRQIEVDGQLITLESGEFQVYKQSHSALTALQTEQVQDSEDSGKMVAKRQFRIGDIAGEHTSFDKLPKGGSATYRGTAFGSDDAGGKLTYTIDFAAKQGHGKIEHLKSPELNVELATAYIKPDEKRHAVISGSVLYNQDEKGSY

SEQ ID NO: 72525 - protein, 221 aa, Neisseria meningitidis
CSSGGGGVAADIGAGLADALTVPLDHKDKSLQSLTLDQSVRKNEKLKLAAQGAEKTYGNGDSLNTGKLKNDKVSRFDFIRQIEVDGQLITLESGEFQIYKQDHSAVVALQIEKINNPDKIDSLINQRSFLVSGLGGEHTAFNQLPSGKAEYHGKAFSSDDAGGKLTYTIDFAAKQGHGKIEHLKTPEQNVELASAELKADEKSHAVILGDTRYGGEEKGTY

SEQ ID NO: 72526 - protein, 222 aa, Neisseria meningitidis
CSSGGGGVAADIGAGLADALTAPLDHKDKGLQSLTLDQSVRKNEKLKLAAQGAEKTYGNGDSLNTGKLKNDKVSRFDFIRQIEVDGQLITLESGEFQVYKQSHSALTALQTEQEQDLEHSGKMVAKRRFKIGDIAGEHTSFDKLPKDVMATYRGTAFGSDDAGGKLTYTIDFAAKQGHGKIEHLKSPELNVDLAVAYIKPDEKHHAVISGSVLYNQDEKGSY

SEQ ID NO: 72527 - protein, 228 aa, Neisseria meningitidis
CSSGSGSGGGGVAADIGTGLADALTAPLDHKDKGLKSLTLEDSISQNGTLTLSAQGAEKTFKVGDKDNSLNTGKLKNDKISRFDFVQKIEVDGQTITLASGEFQIYKQDHSAVVALQIEKINNPDKIDSLINQRSFLVSGLGGEHTAFNQLPSGKAEYHGKAFSSDDAGGKLTYTIDFAAKQGHGKIEHLKTPEQNVELASAELKADEKSHAVILGDTRYGSEEKGTY

SEQ ID NO: 72528 - protein, 229 aa, Neisseria meningitidis
CSSGGGGSGGGGVAADIGTGLADALTAPLDHKDKGLKSLTLEDSIPQNGTLTLSAQGAEKTFKAGDKDNSLNTGKLKNDKISRFDFVQKIEVDGQTITLASGEFQIYKQDHSAVVALQIEKINNPDKIDSLINQRSFLVSGLGGEHTAFNQLPGGKAEYHGKAFSSDDAGGKLTYTIDFAAKQGHGKIEHLKTPEQNVELAAAELKADEKSHAVILGDTRYGSEEKGTY

SEQ ID NO: 72529 - protein, 227 aa, Neisseria meningitidis
CSSGGGGSGGIAADIGTGLADALTAPLDHKDKGLKSLTLEDSIPQNGTLTLSAQGAEKTFKAGDKDNSLNTGKLKNDKISRFDFVQKIEVDGQTITLASGEFQIYKQDHSAVVALQIEKINNPDKIDSLINQRSFLVSGLGGEHTAFNQLPGGKAEYHGKAFSSDDAGGKLTYTIDFAAKQGHGKIEHLKTPEQNVELAAAELKADEKSHAVILGDTRYGSEEKGTY

SEQ ID NO: 72530 - protein, 221 aa, Neisseria meningitidis
CSSGGGGVAADIGAGLADALTAPLDHKDKSLQSLTLDQSVRKNEKLKLAAQGAEKTYGNGDSLNTGKLKNDKVSRFDFIRQIEVDGQLITLESGEFQIYKQDHSAVVALQIEKINNPDKIDSLINQRSFLVSGLGGEHTAFNQLPSGKAEYHGKAFSSDDPNGRLHYSIDFTKKQGYGRIEHLKTPEQNVELASAELKADEKSHAVILGDTRYGGEEKGTY

SEQ ID NO: 72531 - protein, 248 aa, Neisseria meningitidis
VNRTTFCCLSLTAALILTACSSGGGGSGGGGVAADIGTGLADALTAPLDHKDKGLKSLTLEDSIPQNGTLTLSAQGAEKTFKAGDKDNSLNTGKLKNDKISRFDFVQKIEVDGQTITLASGEFQIYKQDHSAVVALQIEKINNPDKIDSLINQRSFLVSGLGGEHTAFNQLPGGKAEYHGKAFSSDDAGGKLTYTIDFAAKQGHGKIEHLKTPEQNVELAAAELKADEKSHAVILGDTRYGSEEKGTY

SEQ ID NO: 72532 - protein, 241 aa, Neisseria meningitidis; identical to SEQ ID NO: 72497

SEQ ID NO: 72533 - protein, 241 aa, Neisseria meningitidis
VNRTAFCCLSLTTALILTACSSGGGGVAADIGAGLADALTAPLDHKDKGLQSLTLDQSVRKNEKLKLAAQGAEKTYGNGDSLNTGKLKNDKVSRFDFIRQIEVDGQLITLESGEFQVYKQSHSALTALQTEQVQDSEHSGKMVAKRQFRIGDIAGEHTSFDKLPEGGRATYRGTAFGSDDAGGKLTYTIDFAAKQGHGKIEHLKSPELNVDLAAAYIKPDEKHHAVISGSVLYNQDEKGSY

SEQ ID NO: 72534 - protein, 241 aa, Neisseria meningitidis
VNRTTFCCLSLTTALILTACSSGGGGVAADIGAGLADALTAPLDHKDKGLQSLTLDQSVRKNEKLKLAAQGAEKTYGNGDSLNTGKLKNDKVSRFDFIRQIEVDGQLITLESGEFQVYKQSHSALTALQTEQVQDSEHSGKMVAKRQFRIGDIAGEHTSFDKLPESGRATYRGTAFGSDDAGGKLTYTIDFAAKQGHGKIEHLKSPELNVDLAAADIKPDEKHHAVISGSVLYNQDEKGSY

SEQ ID NO: 72535 - protein, 248 aa, Neisseria meningitidis
VNRTAFCCLFLTTALILTACSSGGGGSGSGGVAADIGTGLADALTTPLDHKDKGLKSLTLEDSIPQNGTLTLSAQGAEKTFKAGDKDNSLNTGKLKNDKISRFDFVQKIEVDGQTITLASGEFQIYKQDHSAVVALQIEKINNPDKIDSLINQRSFLVSGLGGEHTAFNQLPGGKAEYHGKAFSSDDPNGRLHYSIDFTKKQGYGRIEHLKTPEQNVELASAELKADEKSHAVILGDTRYGSEEKGTY

SEQ ID NO: 72536 - protein, 240 aa, Neisseria meningitidis
VNRTAFCCLSLTAALILTACSSGGGGVAADIGAGLADALTAPLDHKDKSLQSLTLDQSVRKNEKLKLAAQGAEKTYGNGDSLNTGKLKNDKVSRFDFIRQIEEDGQTITLASGEFQIYKQNHSAVVALQIEKINNPDKIDSLINQRSFLVSGLGGEHTAFNQLPDGKAEYHGKAFSSDDPNGRLHYSIDFTKKQGYGRIEHLKTPEQNVELASAELKADEKSHAVILGDTRYGGEEKGTY

SEQ ID NO: 72537 - protein, 241 aa, Neisseria meningitidis
VNRTAFCCLSLTAALILTACSSGGGGVAADIGAGLADALTAPLDHKDKSLQSLTLDQSVRKNEKLKLAAQGAEKTYGNGDSLNTGKLKNDKVSRFDFIRQIEVDGQLITLESGEFQVYKQSHSALTALQTEQVQDSEDSGKMVAKRQFRIGDIAGEHTSFDKLPKGGSATYRGTAFGSDDAGGKLTYTIDFAVKQGHGKIEHLKSPELNVELATAYIKPDEKHHAVISGSVLYNQDEKGSY

SEQ ID NO: 72538 - protein, 241 aa, Neisseria meningitidis; identical to SEQ ID NO: 72437

SEQ ID NO: 72539 - protein, 240 aa, Neisseria meningitidis; identical to SEQ ID NO: 72400

SEQ ID NO: 72540 - protein, 241 aa, Neisseria meningitidis
VNRTAFCCLSLTTALILTACSSGGGGVAADIGAGLADALTAPLDHKDKGLQSLTLDQSVRKNEKLKLAAQGAEKTYGNGDSLNTGKLKNDKVSRFDFIRQIEVDRQLITLESGEFQVYKQSHSALTAFQTEQIQDSEHSGKMVAKRQFRIGDIAGEHTSFDKLPEGGRATYRGTAFGSDDAGGKLTYTIDFAAKQGNGKIEHLKSPELNVDLAAADIKPDGKRHAVISGSVLYNQAEKGSY

SEQ ID NO: 72541 - protein, 241 aa, Neisseria meningitidis
VNRTTFCCLSLTAALILTACSSGGGGVAADIGAGLADALTAPLDHKDKGLQSLTLDQSVRKNEKLKLAAQGAEKTYGNGDSLNTGKLKNDKVSRFDFIRQIEVDGQLITLESGEFQVYKQSHSALTALQTEQVQDSEHSGKMVAKRQFRIGDIAGEHTSFDKLPEGVRATYRGTAFGSDDAGGKLTYTIDFAAKQGHGKIEHLKSPELNVDLAAADIKPDEKHHAVISGSVLYNQDEKGSY

SEQ ID NO: 72542 - protein, 240 aa, Neisseria meningitidis
VNRTAFCCLSLTAALILPACSSGGGGVAADIGAGLADALTAPLDHKDKGLQSLTLDQSVRKNEKLKLAAQGAEKTYGNGDSLNTGKLKNDKVSRFDFIRQIEVDGQLITLESGEFQIYKQDHSAVVALQIEKINNPDKIDSLINQRSFLVSGLGGEHTAFNQLPSGKAEYHGKAFSSDDPNGRLHYSIDFTKKQGYGRIEHLKTPEQNVELASAELKADEKSHAVILGDTRYGGEEKGTY

SEQ ID NO: 72543 - protein, 241 aa, Neisseria meningitidis
VNRTAFCCLSLTTALILTACSSGGGGVAADIGAGLADALTAPLDHKDKGLQSLTLDQSVRKNEKLKLAAQGAEKTYGNGDSLNTGKLKNDKVSRFDFIRQIEVDGQLITLESGEFQVYKQSHSALTAFQTEQIQDSEHSGKMVAKRQFRIGDIAGEHTSFDKLPEGGRATYRGTAFSSDDAGGKLIYTIDFAAKQGYGKIEHLKSPELNVDLAAAYIKPDEKHYAVISGSVLYNQDEKGSY

SEQ ID NO: 72544 - protein, 246 aa, Neisseria meningitidis
VNRTTFCCLSLTAALILTACSSGGGGSGGGGVAADIGTGLADALTAPLDHKDKGLQSLTLDQSVRKNEKLKLAAQGAEKTYGNGDSLNTGKLKNDKVSRFDFIRQIEVDGQLITLESGEFQVYKQSHSALTALQTEQVQDSEDSGKMVAKRQFRIGDIAGEHTSFDKLPKGGRATYRGTAFGSDDAGGKLTYTIDFVAKQGHGKIEHLKSPELNVDLAAAYIKPDEKRHAVISGSVLYNQDEKGSY

SEQ ID NO: 72545 - protein, 241 aa, Neisseria meningitidis; identical to SEQ ID NO: 72383

SEQ ID NO: 72546 - protein, 241 aa, Neisseria meningitidis
VNRTAFCCLSLTTALILTACSSGGGGVAADIGAGLADALTAPLDHKDKGLQSLMLDQSVRKNEKLKLAAQGAEKTYGNGDSLNTGKLKNDKVSRFDFIHQIEVDGQLITLESGEFQVYKQSHSALTALQTEQEQDPEHSGKMVAKRRFKIGDIAGEHTSFDKLPKDVMATYRGTAFGSDDAGGKLTYTIDFAAKQGHGKIEHLKSPELNVELATAYIKPDEKHHAVISGSVLYNQDEKGSY

SEQ ID NO: 72547 - protein, 248 aa, Neisseria meningitidis
VNRTAFCCLFLTTALILTACSSGGGGSGSGGVAADIGTGLADALTTPLDHKDKGLKSLTLEDSIPQNGTLTLSAQGAEKTFKAGDKDNSLNTGKLKNDKISRFDFVQKIEVDGQTITLASGEFQIYKQDHSAVVALQIEKINNPDKIDSLINQRSFLVSGLGGEHTAFNQLPSGKAEYHGKAFSSDDAGGKLTYTIDFAAKQGHGKIEHLKTPEQNVELASAELKADEKSHAVILGDTRYGGEEKGTY

SEQ ID NO: 72548 - protein, 241 aa, Neisseria meningitidis
VNRTAFCCLSLTTALILTACSSGGGGVAADIGAGLADALTAPLDHKDKGLQSLTLDQSVRKNEKLKLAAQGAEKTYGNGDSLNTGKLKNDKVSRFDFIRQIEVDGQLITLESGEFQVYKQSHSALTALQTEQVQDSEHSGKMVAKRQFRIGDIAGEHTSFDKLPESGRATYRGTAFGSDDAGGKLTYTIDFAAKQGHGKIEHLKSPELNVDLAAADIKPDEKHHAVISGSVLYNQDEKGSY

SEQ ID NO: 72549 - protein, 240 aa, Neisseria meningitidis
VNRTTFCCLSLTTALILTACSSGGGGVAADIGAGLADALTAPLDHKDKGLQSLTLDQSVRKNEKLKLAAQGAEKTYGNGDSLNTGKLKNDKVSRFDFIRQIEVDGQLITLESGEFQIYKQDHSAVVALQIEKINNPDKIDSLINQRSFLVSGLGGEHTAFNQLPSGKAEYHGKAFSSDDAGGKLTYTIDFAAKQGHGKIEHLKTPEQNVELASAELKADEKSHAVILGDTRYGGEEKGTY

SEQ ID NO: 72550 - protein, 240 aa, Neisseria meningitidis
VNRTTFCCLSLTTALILTACSSGGGGVAADIGAGLADALTAPLDHKDKSLQSLTLDQSVRKNEKLKLAAQGAEKTYGNGDSLNTGKLKNDKVSRFDFIRQIEVDGQLITLESGEFQIYKQDHSAVVALQIEKINNPDKIDSLINQRSFLVSGLGGEHTAFNQLPGGKAEYHGKAFSSDDPNGRLHYSIDFTKKQGYGRIEHLKTPEQNVELASAELKADEKSHAVILGDTRYGSEEKGTY

SEQ ID NO: 72551 - protein, 240 aa, Neisseria meningitidis
VNRTAFCCFSLTAALILTACSSGGGGVAADIGAGLADALTVPLDHKDKSLQSLTLDQSVRKNEKLKLAAQGAEKTYGNGDSLNTGKLKNDKVSRFDFIRQIEVDGQLITLESGEFQIYKQDHSAVVALQIEKINNPDKIDSLINQRSFLVSGLGGEHTAFNQLPSGKAEYHGKAFSSDDAGGKLTYTIDFAAKQGHGKIEHLKTPEQNVELASAELKADEKSHAVILGDTRYGGEEKGTY

SEQ ID NO: 72552 - protein, 240 aa, Neisseria meningitidis
VNRTAFCCFSLTAALILTACSSGGGGVAADIGAGLADALTAPLDHKDKGLQSLTLDQSVRKNEKLKLAAQGAEKTYGNGDSLNTGKLKNDKVSRFDFIRQIEVDGQLITLESGEFQIYKQDHSAVVALQIEKINNPDKIDSLINQRSFLVSGLGGEHTAFNQLPSGKAEYHGKAFSSDDAGGKLTYTIDFAAKQGHGKIEHLKTPEQNVELASAELKADEKSHAVILGDTRYGGEEKGTY

SEQ ID NO: 72553 - protein, 241 aa, Neisseria meningitidis
VNRTAFCCLSLTTALILTACSSGGGGVAADIGAGLADALTAPLDHKDKGLQSLMLDQSVRKNEKLKLAAQGAEKTYGNGDSLNTGKLKNDKVSRFDFIHQIEVDGQLITLESGEFQVYKQSHSALTALQTEQEQDPEHSGKMVAKRRFKIGDIAGEHTSFDKLPKDVMATYRGTAFGSDDAGGKLTYTIDFAAKQGHGKIEHLKSPELNVELATAYIKPDEKHHAVISGSVLYNQNEKGSY

SEQ ID NO: 72554 - protein, 243 aa, Neisseria meningitidis
VNRTAFCCLSLTAALILTACSSGGGGVAADIGAGLADALTTPLDHKDKGLKSLTLEDSIPQNGTLTLSAQGAEKTFKAGDKDNSLNTGKLKNDKISRFDFVQKIEVDGQTITLASGEFQIYKQDHSAVVALQIEKINNPDKIDSLINQRSFLVSGLGGEHTAFNQLPGGKAEYHGKAFSSDDAGGKLTYTIDFAAKQGHGKIEHLKTPEQNVELAAAELKADEKSHAVILGDTRYGSEEKGTY

SEQ ID NO: 72555 - protein, 241 aa, Neisseria meningitidis
VNRTTFCCLSLTTALILTACSSGGGGVAADIGAGLADALTAPLDHKDKGLQSLTLDQSVRKNEKLKLAAQGAEKTYGNGDSLNTGKLKNDKVSRFDFIRQIEVDGQLITLESGEFQVYKQSHSALTALQTEQVQDSEHSGKMVAKRQFRIGDIAGEHTSFDKLPKGGRATYRGTAFGSDDAGGKLTYTIDFAAKQGNGKIEHLKSPELNVDLAAADIKPDEKRHAVISGSVLYNQAEKGSY

SEQ ID NO: 72556 - protein, 222 aa, Neisseria meningitidis
CSSGGGGVAADIGAVLADALTAPLDHKDKSLQSLTLDQSVRKNEKLKLAAQGAEKTYGNGDSLNTGKLKNDKVSRFDFIRQIEVDGQLITLESGEFQVYKQSHSALTALQTEQVQDSEHSGKMVAKRQFRIGDIAGEHTSFDKLPEGGRATYRGTAFGSDDASGKLTYTIDFAAKQGHGKIEHLKSPELNVDLAASDIKPDKKRHAVISGSVLYNQAEKGSY

SEQ ID NO: 72557 - protein, 222 aa, Neisseria meningitidis
CSSGGGGVAADIGAGLADALTAPLDHKDKGLQSLTLDQSVRKNEKLKLAAQGAEKTYGNGDSLNTGKLKNDKVSRFDFIRQIEVNGQLITLESGEFQVYKQSHSALTALQTEQVQDSEHSRKMVAKRQFRIGDIAGEHTSFDKLPKGDSATYRGTAFGSDDAGGKLTYTIDFAAKQGYGKIEHLKSPELNVDLAAAYIKPDEKHHAVISGSVLYNQDEKGSY

SEQ ID NO: 72558 - protein, 226 aa, Neisseria meningitidis
CSSGSGGGGVAADIGTGLADALTAPLDHKDKGLKSLTLEDSIPQNGTLTLSAQGAEKTFKAGDKDNSLNTGKLKNDKISRFDFVQKIEVDGQTITLASGEFQIYKQNHSAVVALQIEKINNPDKIDSLINQRSFLVSGLGGEHTAFNQLPGGKAEYHGKAFSSDDPNGRLHYTIDFTNKQGYGRIEHLKTPELNVDLASAELKADEKSHAVILGDTRYGSEEKGTY

SEQ ID NO: 72559 - protein, 240 aa, Neisseria meningitidis
VNRTAFCCLSLTTALILTACSSGGGGVAADIGAGLADALTAPLDHKDKGLQSLTLDQSVRKNEKLKLAAQGAEKTYGNGDSLNTGKLKNDKVSRFDFIRQIEVDGQLITLESGEFQIYKQDHSAVVALQIEKINNPDKIDSLINQRSFLVSGLGGEHTAFNQLPSGKAEYHGKAFSSDDAGGKLTYTIDFAAKQGHGKIEHLKTPEQNVELASAELKADEKSHAVILGDTRYGGEEKGTY

SEQ ID NO: 72560 - protein, 240 aa, Neisseria meningitidis
VNRTAFCCLSLTAALILTACSSGGGGVAADIGAGLADALTAPLDHKDKSLQSLTLDQSVRKNEKLKLAAQGAEKTYGNGDSLNTGKLKNDKVSRFDFIRQIEVDGQLITLESGEFQIYKQDHSAVVALQIEKINNPDKIDSLINQRSFLVSGLGGEHTAFNQLPGGKAEYHGKAFSSDDPNGRLPYSIDFTKKQGYGRIEHLKTPEQNVELASAELKADEKSHAVILGDTRYGSEEKGTY

SEQ ID NO: 72561 - protein, 240 aa, Neisseria meningitidis
VNRTAFCCLSLTAALILTACSSGGGRVAADIGAGLADALTAPLDHKDKSLQSLTLDQSVRKNEKLKLAAQGAEKTYGNGDSLNTGKLKNDKVSRFDFIRQIEVDGQLITLESGEFQIYKQDHSAVVALQIEKINNPDKIDSLINQRSFLVSGLGGEHTAFNQLPSGKAEYHGKAFSSDDAGGKLTYTIDFAAKQGHGKIEHLKTPEQNVKLASAELKADEKSHAVILGDTRYGGEEKGTY

SEQ ID NO: 72562 - protein, 240 aa, Neisseria meningitidis
VNRTAFCCLSLTAALILTACSSGGGGVAADIGAGLADALTAPLDHKDKSLQSLTLDQSVRKNEKLKLAAQGAEKTYANGDSLNTGKLKNDKVSRFDFIRQIEVDGQLITLESGEFQIYKQDHSAVVALQIEKINNPDKIDSLINQRSFLVSGLGGEHTAFNQLPSGKAEYHGKAFSSDDPNGRLHYSIDFTKKQGYGRIEHLKTPEQNVELASAELKADEKSHAVILGDTRYGGEEKGTY

SEQ ID NO: 72563 - protein, 243 aa, Neisseria meningitidis
VNRTAFCCLSLTTALILTACSSGGGGVAADIGAGLADALTAPLDHKDKGLKSLTLEDSIPQNGTLTLSAQGAEKTFKAGDKDNSLNTGKLKNDKISRFDFVQKIEVDGQTITLASGEFQIYKQDHSAVVALQIEKINNPDKIDSLINQRSFLVSGLGGEHTAFNQLPGGKAEYHGKAFSSDDAGGKLTYTIDFAAKQGHGKIEHLKTPEQNVELAAAELKADEKSHAVILGDTRYGSEEKGTY

SEQ ID NO: 72564 - protein, 241 aa, Neisseria meningitidis
VNRTAFCCLSLTTALILTACSSGGGGVAADIGAGLADALTAPLDHKDKGLQSLTLDQSVRKNEKLKLAAQGAEKTYGNGDSLNTGKLKNDKVSRLDFIRQIEVDGQLITLESGEFQVYKQSHSALTAFQTEQIQDSEHSGKMVAKRQFRIGDIAGEHTSFDKLPEGGRATYRGTAFGSDDAGGKLTYTIDFAAKQGNGKIEHLKSPELNVDLAAADIKPDGKRHAVISGSVLYNQAEKGSY

SEQ ID NO: 72565 - protein, 248 aa, Neisseria meningitidis
VNRTAFCCLFLTTALILTACSSGGGGSGGGGVAADIGAGLADALTAPLDHKDKGLKSLTLEDSISQNGTLTLSAQGAERTFKAGNKDNSLNTGKLKNDKISRFDFVQKIEVDGQTITLASGEFQIYKQNHSAVVALQIEKINNPDKIDSLINQRSFLVSSLGGEHTAFNQLPGGKAEYHGKAFSSDDPNGRLHYSIDFTKKQGYGRIEHLKTPEQNVELAAAELKADEKSHAVILGDTRYGSEEKGTY

SEQ ID NO: 72566 - protein, 248 aa, Neisseria meningitidis
VNRTTFCCLSLTTALILTACSSGGGGSGGGGVAADIGAGLADALTAPLDHKDKGLKSLTLEDSIPQNGTLTLSAQGAEKTFKAGGKDNSLNTGKLKNDKISRFDFVQKIEVDGQTITLASGEFQIYKQDHSAVVALQIEKINNPDKTDSLINQRSFLVSGLGGEHTAFNQLPGGKAEYHGKAFSSDDPNGRLHYSIDFTKKQGYGRIEHLKTLEQNVELAAAELKADEKSHAVILGDTRYGSEEKGTY

SEQ ID NO: 72567 - protein, 246 aa, Neisseria meningitidis
VNRTTFCCLSLTAALILTACSSGGGGSGGVAADIGAGLADALTAPLDHKDKGLKSLTLEDSIPQNGTLTLSAQGAEKTFKAGDKDNSLNTGKLKNDKISRFDFVQKIEVDGQTITLASGEFQIYKQNHSAVVALQIEKINNPDKIDSLINQRSFLVSGLGGEHTAFNQLPGGKAEYHGKAFSSDDPNGRLHYTIDFTNKQGYGRIEHLKTPELNVDLASAELKADEKSHAVILGDTRYGSEEKGTY

SEQ ID NO: 72568 - protein, 241 aa, Neisseria meningitidis
VNRTAFCCFSLTAALILTACSSGGGGVAADIGAGLADALTAPLDHKDKSLQSLTLDQSVRKNEKLKLAAQGAEKTYGNGDSLNTGKLKNDKVSRFDFIRQIEVDGQLITLESGEFQVYKQSHSALTALQTEQEQDPEHSGKMVAKRRFKIGDIAGEHTSFDKLPKDVMATYRGTAFGSDDAGGKLTYTIDFAAKQGHGKIEHLKSPELNVELAAAYIKPDEKRHAVISGSVLYNQDEKGSY

SEQ ID NO: 72569 - protein, 243 aa, Neisseria meningitidis
VNRTAFCCLSLTAALILTACSSGGGGVAADIGAGLADALTAPLDHKDKGLKSLTLEDSIPQNGTLTLSAQGAEKTFKAGDKDNSLNTGKLKNDKISRFDFVQKIEVDGQTITLASGEFQIYKQDHSAVVALQIEKINNPDKIDSLINQRSFLVSGLGGEHTAFNQLPGGKAEYHGKAFSSDDAGGKLTYTIDFAAKQGHGKIEHLKTPEQNVELAAAELKADEKSHAVILGDTRYGSEEKGTY

SEQ ID NO: 72570 - protein, 243 aa, Neisseria meningitidis
VNRTAFCCFSLTAALILTACSSGGGGVAADIGAGLADALTAPLDHKDKGLKSLTLEDSISQNGTLTLSAQGAERTFKAGNKDNSLNTGKLKNDKISRFDFVQKIEVDGQTITLASGEFQIYKQNHSAVVALQIEKINNPDKIDSLINQRSFLVSSLGGEHTAFNQLPGGKAEYHGKAFSSDDPNGRLHYSIDFTKKQGYGRIEHLKTPEQNVELAAAELKADEKSHAVILGDTRYGSEEKGTY

SEQ ID NO: 72571 - protein, 242 aa, Neisseria meningitidis
VNRTAFCCLFLTTALILTACSSGGGVAADIGTGLADALTAPLDHKDKGLKSLTLEDSIPQNGTLTLSAQGAEKTFKAGDKDNSLNTGKLKNDKISRFDFVQKIEVDGQTITLASGEFQIYKQDHSAVVALQIEKINNPDKIDSLINQRSFLVSGLGGEHTAFNQLPSGKAEYHGKAFSSDDAGGKLTYTIDFAAKQGHGKIEHLKTPEQNVELASAELKADEKSHAVILGDTRYGGEEKGTY

SEQ ID NO: 72572 - protein, 241 aa, Neisseria meningitidis
VNRTAFCCFSLTAALILTACSSGGGGVAADIGAGLADALTAPLDHKDKGLQSLTLDQSVRKNEKLKLAAQGAEKTYGNGDSLNTGKLKNDKVSRFDFIRQIEVDGQLITLESGEFQVYKQSHSALTALQTEQVQDSEDSGKMVAKRQFRIGDIAGEHTSFDKLPKGGSATYRGTAFGSDDAGGKLTYTIDFAVKQGHGKIEHLKSPELNVDLAAAYIKPDKKRHAVISGSVLYNQDEKGSY

SEQ ID NO: 72573 - protein, 246 aa, Neisseria meningitidis
VNRTTFCCLSLTAALILTACSSGGGGSGGGGVAADIGAGLADALTAPLDHKDKGLQSLTLDQSVRKNEKLKLAAQGAEKTYGNGDSLNTGKLKNDKVSRFDFIRQIEVDGQLITLESGEFQVYKQSHSALTAFQTEQIQDSEHSGKMVAKRQFRIGDIAGEHTSFDKLPEGGRATYRGTAFGSDDAGGKLTYTIDFAAKQGNGKIEHLKSPELNVDLAAADIKPDGKRHAVISGSVLYNQAEKGSY

SEQ ID NO: 72574 - protein, 246 aa, Neisseria meningitidis
VNRTTCCCLSLTAALILTACSSGGGGSGGGGVAADIGTGLADALTAPLDHKDKGLQSLTLDQSVRKNEKLKLAAQGAEKTYGNGDSLNTGKLKNDKISRFDFIRQIEVDGQLITLESGEFQVYKQSHSALTALQTEQVQDSEDSGKMVAKRQFRIGDIAGEHTSFDNLPEGGSATYRGTAFGSDDAGGKLTYTIDFAAKQGHGKIEHLKSPELNVELAAAYIKPDEKRHAVISGSVLYNQDEKGSY

SEQ ID NO: 72575 - protein, 241 aa, Neisseria meningitidis
VNRTAFCCLSLTAALILTACSSGGGGVAADIGAGLADALTAPLDHKDKGLQSLMLDQSVRKNEKLKLAAQGAEKTYGNGDSLNTGKLKNDKISRFDFIRQIEVDGQLITLESGEFQVYKQSHSALTALQTEQVQDSEDSRKMVAKRQFRIGDIAGEHTSFDKLPESDRATYRGTAFSSDDAGGKLTYTIDFAAKQGHGKIEHLKSPELNVELATAYIKPDEKRHAVISGSVLYNQDEKGSY

SEQ ID NO: 72576 - protein, 241 aa, Neisseria meningitidis; identical to SEQ ID NO: 72393

SEQ ID NO: 72577 - protein, 248 aa, Neisseria meningitidis
VNRTTFFCLSLTAALILTACSSGGGGSGGGGVAADIGAGLADALTAPLDHKDKGLKSLTLEDSIPQNGTLTLSAQGAEKTFKAGGKDNSLNTGKLKNDKISRFDFVQKIEVDGQTITLASGEFQIYKQDHSAVVALQIEKINNPDKTDSLINQRSFLVSGLGGEHTAFNQLPGGKAEYHGKAFSSDDPNGRLHYTIDFTNKQGYGRIEHLKTPEQNVELASAELKADEKSHAVILGDTRYGSEEKGTY

SEQ ID NO: 72578 - protein, 240 aa, Neisseria meningitidis
VNRTTFCCLSLTAALILTACSSGGGGVAADIGAGLADALTAPLDHKDKSLQSLTLDQSVRKNEKLKLAAQGAEKTYGNGDSLNTGKLKNDKVSRFDFIRQIEVDGQLITLESGEFQIYKQDHSAVVALQIEKINNPDKIDSLINQRSFLVSGLGGEHTAFNQLPSGKAEYHGKAFSSDDAGGKLTYTIDFAAKQGHGKIEHLKTPEQNVELASAELKADEKSHAVILGDTRYGGEEKGTY

SEQ ID NO: 72579 - protein, 243 aa, Neisseria meningitidis
VNRTAFCCLSLTTALILTACSSGGGGVAADIGAGLADALTAPLDHKDKGLKSLTLEDSIPQNGTLTLSAQGAEKTFKAGDKDNSLNTGKLKNDKISRFDFVQKIEVDGQTITLASGEFQIYKQNHSAVVALQIEKINNPDKIDSLINQRSFLVSGLGGEHTAFNQLPVGKAEYHGKAFSSDDAGGKLTYTIDFAAKQGHGKIEHLKSPELNVELATAELKADEKSHAVILGDTRYGGEEKGTY

SEQ ID NO: 72580 - protein, 243 aa, Neisseria meningitidis
VNRTAFCCLSLTTALILTACSSGGGGIAADIGTGLADALTAPLDHKDKGLKSLTLEDSIPQNGTLTLSAQGAEKTFKAGDKDNSLNTGKLKNDKISRFDFVQKIEVDGQTITLASGEFQIYKQDHSAVVALQIEKINNPDKIDSLINQRSFLVSGLGREHTAFNQLPGGKAEYHGKAFSSDDPNGRLHYSIDFTKKQGYGRIEHLKTPEQNVELASAELKADEKSHAVILGDTRYGSEEKGTY

SEQ ID NO: 72581 - protein, 241 aa, Neisseria meningitidis
VNRTAFCCFSLTAALILTACSSGGGGVAADIGAGLADALTAPLDHKDKSLQSLTLDQSVRKNEKLKLAAQGAEKTYGNADSLNTGKLKNDKVSRFDFIRQIEVDGQLITLESGEFQVYKQSHSALTALQTEQEQDPEHSGKMVAKRRFKIGDIAGEHTSFDKLPKDVMATYRGTAFGSDDAGGKLTYTIDFAAKQGHGKIEHLKSPELNVELATAYIKPDEKHHAVISGSVLYNQDEKGSY

SEQ ID NO: 72582 - protein, 241 aa, Neisseria meningitidis
VNRTAFCCLSLTAALILTACSSGGGGVAADIGAGLADALTAPLDHKDKGLRSLTLDQSVRKNEKLKLAAQGAEKTYGNGDSLNTGKLKNDKVSRFDFIRQIEVDGQLITLESGEFQVYKQSHSALTAFQTEQIQDSEHSGKMVAKRRFRIGDIAGEHTSFDKLPEGGRATYRGTAFSSDDAGGKLTYTIDFAAKQGYGKIEHLKSPELNVDLVSADIKPDEKRHAVISGSVLYNQDEKGSY

SEQ ID NO: 72583 - protein, 240 aa, Neisseria meningitidis
VNRTAFCCLSLTAALILTACSSGGGGVAADIGAGLADALTAPLDHKDKSLQSLTMDQSVRKNEKLKPAAQGAEKTYGNGDSLNTGKLKNDKVSRFDFIRQIEVDGQLITLESGEFQIYKQDHSAVVALQIEKINNPDKIDSLINQRSFLVSGLGGEHTAFNQLPSGKAEYHGKAFSSDDPNGRLHYSIDFTKKQGYGRIEHLKTPEQNVELASAELKADEKSHAVILGDTRYGGEEKGTY

SEQ ID NO: 72584 - protein, 240 aa, Neisseria meningitidis
VNRTAFCCLSLTAALILTACSSGGGGVAADIGAGLADALTAPLDHKDKGLQSLTLDQSVRKNEKLKLAAQGAEKTYGNGDSLNTGKLKNDKVSRFDFIRQIEVDGQLITLESGEFQIYKQDHSAVVALQIEKINNPDKIDSLINQRSFLVSGLGGEHTAFNQLPDGKAEYHGKAFSSDDAGGKLTYTIDFAAKQGHGKIEHLKTPEQNVELAAAELKADEKSHAVILGDTRYGSEEKGTY

SEQ ID NO: 72585 - protein, 241 aa, Neisseria meningitidis
VNRTTFCCLSLTAALILTACSSGGGGVAADIGAGLADALTAPLDHKDKSLQSLTLDQSVRKNEKLKLAAQGAEKTYGNGDSLNTGKLKNDKVSRFDFIRQIEVDGQLITLESGEFQVYKQSHSALTALQTEQVQDSEHSGKMVAKRQFRIGDIAGEHTSFDKLPEGGRATYRGTAFSSDDAGGKLTYTIDFAAKQGHGKIEHLKSPELNVDLAAADIKPDEKHHAVISGSVLYNQDEKGSY

SEQ ID NO: 72586 - protein, 246 aa, Neisseria meningitidis
VNRTTFCCLSLTAALILTACSSGGGGSGGGGVTADIGTGLADALTAPLDHKDKGLKSLTLEDSISQNGTLTLSAQGAEKTYGNGDSLNTGKLKNDKVSRFDFIRQIEVDGQLITLESGEFQVYKQSHSALTALQTEQEQDPEHSEKMVAKRRFRIGDIAGEHTSFDKLPKDVMATYRGTAFGSDDAGGKLTYTIDFAAKQGHGKIEHLKSPELNVDLAVAYIKPDEKHHAVISGSVLYNQDEKGSY

SEQ ID NO: 72587 - protein, 240 aa, Neisseria meningitidis; identical to SEQ ID NO: 72428

SEQ ID NO: 72588 - protein, 247 aa, Neisseria meningitidis
VNRTAFCCLSLTAALILTACSSGSGSGGGGVAADIGTGLADALTAPLDHKDKGLKSLTLEDSISQNGTLTLSAQGAEKTFKVGDKDNSLNTGKLKNDKISRFDFVQKIEVDGQTITLASGEFQIYKQDHSAVVALQIEKINNPDKIDSLINQRSFLVSGLGGEHTAFNQLPSGKAEYHGKAFSSDDAGGKLTYTIDFAAKQGHGKIEHLKTPEQNVELASAELKADKKSHAVILGDTRYGSEEKGTY

SEQ ID NO: 72589 - protein, 241 aa, Neisseria meningitidis
VNRTAFCCLSLTAALILTACSSGGGGVAADIGAGLADALTAPLDHKDKSLQSLTLDQSVRKNEKLKLAAQGAEKTYGNGDSLNTGKLKNDKVSRFDFIRQIEVDGQLITLESGEFQVYKQSHSALTALQTEQVQDSEDSGKMVAKRQFRIGDIAGEHTSFDKLPKGGSATYRGTAFGSDDAGGKLTYTIDFAAKQGHGKIEHLKSPELNVELAAAYIKPDEKHHAVISGSVLYNQDEKGSY

SEQ ID NO: 72590 - protein, 240 aa, Neisseria meningitidis
VNRTAFYCLSLTAALILTACSSGGGGVAADIGAGLADALTAPLDHKDKSLQSLTLDQSVRKNEKLKLAAQGAEKTYGNGDSLNTGKLKNDKVSRFDFIRQIEVDGQLITLESGEFQIYKQDHSAVVALQIEKINNPDKIDSLINQRSFLVSGLGGEHTAFNQLPDGKAEYHGKAFSSDDAGGKLTYTIDFAAKQGHGKIEHLKTPEQNVELAAAELKADEKSHAVILGDTRYGSEEKGTY

SEQ ID NO: 72591 - protein, 240 aa, Neisseria meningitidis; identical to SEQ ID NO: 72401

SEQ ID NO: 72592 - protein, 243 aa, Neisseria meningitidis
VNRTAFCCLSLTTALILTACSSGGGGVAADIGAGLADALTAPLDHKDKGLKSLTLEDSIPQNGTLTLSAQGAEKTFKAGGKDNSLNTGKLKNDKISRFDFVQKIEVDGQTITLASGEFQIYKQDHSAVVALQIEKINNPDKIDSLINQRSFLVSGLGGEHTAFNQLSGGKAEYHGKAFSSDDPNGRLHYTIDFTNKQGYGRIEHLKTPEQNVELASAELKADEKSHAVILGDTRYGSEEKGTY

SEQ ID NO: 72593 - protein, 240 aa, Neisseria meningitidis
VNRTAFCCLSLTTALILTACSSGGGGVAADIGAGLADALTAPLDHKDKGLQSLMLDQSVRKNEKLKLAAQGAEKTYGNGDSLNTGKLKNDKVSRFDFIRQIEVDGQLITLESGEFQIYKQNHSAVVALQIEKINNPDKIDSLINQRSFLVSGLGGEHTAFNQLPSGKAEYHGKAFSSDDPNGRLHYSIDFTKKQGYGRIEHLKTPEQNVELASAELKADEKSHAVILGDTRYGGEEKGTY

SEQ ID NO: 72594 - protein, 241 aa, Neisseria meningitidis
VNRTAFCCLFLTTTLILTACSSGGGGVAADIGAGLADALTAPLDHKDKGLRSLMLDQSVRKNEKLKLSAQGAEKTYGNGDSLNTGKLKNDKVSRFDFIRQIEVDGQLITLESGEFQVYKQSHSALTALQTEQVQDSEDSGKMVAKRQFRIGDIAGEHTSFDKLPKGDSATYRGTAFSSDDAGGKLTYTIDFAAKQGHGKIEHLKSPELNVELATAYIKPDEKRHAVISGSVLYNQDEKGSY

SEQ ID NO: 72595 - protein, 243 aa, Neisseria meningitidis
VNRTTFCCLSLTAALILTACSSGGGGVAADIGAGLADALTAPLDHKDKGLKSLTLEDSISQNGTLTLSAQGAEKTFKVGDKDNSLNTGKLKNDKISRFDFVQKIEVDGQTITLASGEFQIYKQNHSAVVALQIEKINNPDKIDSLINQRSFLVSGLGGEHTAFNQLPGGKAEYHGKAFSSDDAGGKLTYTIDFAAKQGHGKIEHLKTPEQNVELAAAELKADEKSHAVILGDTHYGSEEKGTY

SEQ ID NO: 72596 - protein, 243 aa, Neisseria meningitidis
VNRTAFCCLFLTTALILTACSSGGGGVAADIGTGLADALTAPLDHKDKGLKSLTLEDSIPQNGTLTLSAQGAEKTFKAGDKDNSLNTGKLKNDKISRFDFVQKIEVDGQTITLASGEFQIYKQNHSAVVALQIEKINNPDKIDSLINQRSFLVSGLGGEHTAFNQLPVGKAEYHGKAFSSDDAGGKLTYTIDFAAKQGHGKIEHLKSPELNVELATAELKADEKSHAVILGDTRYGSEEKGTY

SEQ ID NO: 72597 - protein, 246 aa, Neisseria meningitidis
VNRTTFCCLSLTAALILTACSSGGGGSGGGGVAVDIGTGLADALTAPLDHKDKGLQSLTLDQSVRKNEKLKLAAQGAEKTYGNGDSLNTGKLKNDKISRFDFIRQIEVDGQLITLESGEFQVYKQSHSALTALQTEQVQDSEDSGKMVAKRQFRIGDIAGEHTSFDKLPKDVMATYRGTAFGSDDAGGKLTYTIDFAAKQGHGKIEHLKSPELNVELAAAYIKPDEKHHAVISGSVLYNQDEKGSY

SEQ ID NO: 72598 - protein, 241 aa, Neisseria meningitidis
VNRTAFCCLSLTAALILTACSSGGGGVAADIGAGLADALTAPLDHKDKGLQSLTLDQSVRKNEKLKLAAQGAEKTYGNGDSLNTGKLKNDKVSRFDFIRQIEVDGQLITLESGEFQVYKQSHSALTAFQTEQIQDSEHSGKMVAKRRFRIGDIAGEHTSLDKLPKGGRATYRGTAFGSDDAGGKLTYTIDFAAKQGHGKIEHLKSPELNVDLAAADIKPDEKRHAVISGSVLYNQAEKGSY

SEQ ID NO: 72599 - protein, 243 aa, Neisseria meningitidis
VNRTAFCCLSLTAALILTACSSGGGGVAADIGTGLADALTAPLDHKDKGLKSLTLEDSIPQNGTLTLSAQGAEKTFKAGDKDNSLNTGKLKNDKISRFDFVQKIEVDGQTITLASGEFQIYKQDHSAVVALQIEKINNPDKIDSLINQRSFLVSGLGGEHTAFNQLPGGKAEYHGKAFSSDDPNGRLHYSIDFTKKQGYGRIEHLKTPEQNVELASAELKADEKSHAVILGDTRYGSEEKGTY

SEQ ID NO: 72600 - protein, 248 aa, Neisseria meningitidis
VNRTAFCCLFLTTTLILTACSSGGGGSGSGGVAADIGTGLADALTTPLDHKDKGLKSLTLEDSIPQNGTLTLSAQGAEKTFKAGDKDNSLNTGKLKNDKISRFDFVQKIEVDGQTITLASGEFQIYKQDHSAVVALQIEKINNPDKIDSLMNQRSFLVSGLGGEHTAFNQLPGGKAEYHGKAFSSDDAGGKLTYTIDFAAKQGHGKIEHLKTPEQNVELAAAELKADEKSHAVILGDTRYGSEEKGTY

SEQ ID NO: 72601 - protein, 240 aa, Neisseria meningitidis
VNRTAFCCLSLTAALILTACSSGGGGVAADIGAGLADALTTPLDHKDKSLQSLTLDQSVRKNEKLKLAAQGAEKTYGNGDSLNTGKLKNDKVSRFDFIRQIEVDGQLITLESGEFQIYKQDHSAVVALQIEKINNPDKIDSLINQRSFLVSGLGGEHTAFNQLPDGKAEYHGKAFSSDDAGGKLTYTIDFAAKQGHGKIEHLKTPEQNVELAAAELKADEKSHAVILGDTRYGSEEKGTY

SEQ ID NO: 72602 - protein, 246 aa, Neisseria meningitidis
VNRTAFCCLSLTAALILTACSSGGGGSGGVAADIGTGLADALTAPLDHKDKGLKSLTLEDSIPQNGTLTLSAQGAEKTFKAGGKDNSLNTGKLKNDKVSRFDFVQKIEVDGQTITLASGEFQIYKQDHSAVVALQIEKINNPDKIDSLINQRSFLVSGLGGEHTAFNQLPDGKAEYHGKAFSSDDAGGKLTYTIDFAAKQGHGKIEHLKTPEQNVELAAAELKADEKSHAVILGDTRYGSEEKGTY

SEQ ID NO: 72603 - protein, 241 aa, Neisseria meningitidis
VNRTAFCCLSLTTALILTACSSGGGGVAADIGAGLADALTAPLDHKDKGLQSLTLDQSVRKNEKLKLAAQGAEKTYGNGDSLNTGKLKNDKVSRFDFIRQIEVDGQLITLESGEFQVYKQSHSALTALQTEQVQDSEDSGKMVAKRQFRIGDIAGEHTSFDKLPKGGSATYRGTAFGSDDAGGKLTYTIDFAAKQGHGKIEHLKSPELNVDLAAAYIKPDEKHHAVISGSVLYNQAEKGSY

SEQ ID NO: 72604 - protein, 241 aa, Neisseria meningitidis
VNRTAFCCLSLTAALILTACSSGGGGVAADIGAGLADALTAPLDHKDKSLQSLTLDQSVRKNEKLKLAAQGAEKTYGNGDSLNTGKLKNDKVSRFDFIHQIEVDGQLITLESGEFQVYKQSHSALTALQTEQEQDPEHSGKMVAKRRFKIGDIAGEHTSFDKLPKDVMATYRGTAFGSDDAGGKLTYTIDFAAKQGHGKIEHLKSPELNVELATAYIKPDEKHHAVISGSVLYNQDEKGSY

SEQ ID NO: 72605 - protein, 246 aa, Neisseria meningitidis
VNRTAFCCLSLTAALILTACSSGGGGSGGVAADIGTGLADALTAPLDHKDKGLKSLTLEDSIPQNGTLTLSAQGAEKTFKAGGKDNSLNTGKLKNDKISRFDFVQKIEVDGQTITLASGEFQIYKQDHSAVVALQIEKINNPDKIDSLINQRSFLVSGLGGEHTAFNQLPGGKAEYHGKAFSSDDAGGKLTYTIDFAAKQGHGRIEHLKTPEQNVELASAELKADEKSHAVILGDTRYGSEEKGTY

SEQ ID NO: 72606 - protein, 222 aa, Neisseria meningitidis
CSSGGGGVAADIGAGLADALTAPLDHKDKGLQSLMLDQSVRKNEKLKLAAQGAEKTYGNGDSLNTGKLKNDKVSRFDFIRQIEVDGQLITLESGEFQVYKQSHSALTALQTEQVQDSEDSGKMVAKRQFRIGDIAGEHTSFDKLPKDVMATYRGTAFGSDDAGGKLTYTIDFAAKQGHGKIEHLKSPELNVELAAAYIKPDEKHHAVISGSVLYNQDEKGSY

SEQ ID NO: 72607 - protein, 222 aa, Neisseria meningitidis
CSSGGGGVAADIGAGLADALTAPLDHKDKGLQSLMLDQSVRKNEKLKLAAQGAEKTYGNGDSLNTGKLKNDKISRFDFIRQIEVDGQLITLESGEFQVYKQSHSALTALQTEQVQDSEDSRKMVAKRQFRIGDIAGEHTSFDKLPESDRATYRGTAFSSDDAGGKLTYTIDFAAKQGHGKIEHLKSPELNVDLAAADIKPDEKRHAVISGSVLYNQDEKGSY

SEQ ID NO: 72608 - protein, 248 aa, Neisseria meningitidis
VNRTAFCCLFLTTTLILTACSSGGGGSGSGGVAADIGTGLADALTAPLDHKDKGLKSLTLEDSIPQNGTLTLSAQGAEKTFKAGDKDNSLNTGKLKNDKISRFDFVQKIEVDGQTITLASGEFQIYKQDHSAVVALQIEKINNPDKIDSLMNQRSFLVSGLGGEHTAFNQLPGGKAEYHGKAFSSDDAGGKLTYTIDFAAKQGHGKIEHLKTPEQNVELAAAELKADEKSHAVILGDTRYGSEEKGTY

SEQ ID NO: 72609 - protein, 240 aa, Neisseria meningitidis; identical to SEQ ID NO: 72434

SEQ ID NO: 72610 - protein, 222 aa, Neisseria meningitidis
CSSGGGGVAADIGAGLADALTAPLDHKDKSLQSLTLDQSVRKNEKLKLAAQGAEKTYGNGDSLNTGKLKNDKVSRFDFIRQIEVDGQLITLESGEFQVYKQSHSALTALQTEQVQDSEDSGKMVAKRQFRIGDIAGEHTSFDKLPKGGSATYRGTAFGSDDAGGKLTYTIDFAAKQGHGKIEHLKSPELNVELAAAYIKPDEKHHAVISGSVLYNQDEKGSY

SEQ ID NO: 72611 - protein, 221 aa, Neisseria meningitidis
CSSGGGGVAADIGAGLADALTTPLDHKDKSLQSLTLDQSVRKNEKLKLAAQGAEKTYGNGDSLNTGKLKNDKVSRFDFIRQIEVDGQLITLESGEFQIYKQNHSAVVALQIEKINNPDKIDSLINQRSFLVSGLGGEHTAFNQLPSGKAEYHGKAFSSDDPNGRLHYSIDFTKKQGYGRIEHLKTPEQNVELASAELKADEKSHAVILGDTRYGGEEKGTY

SEQ ID NO: 72612 - protein, 224 aa, Neisseria meningitidis
CSSGGGGVAADIGAGLADALTAPLDHKDKGLKSLTLEDSIPQNGTLTLSAQGAEKTFKAGGKDNSLNTGKLKNDKISRFDFVQKIEVDGQTITLASGEFQIYKQDHSAVVALQIEKINNPDKIDSLINQRSFLVSGLGGEHTAFNQLSGGKAEYHGKAFSSDDPNGRLHYTIDFTNKQGYGRIEHLKTPEQNVELASAELKADEKSHAVILGDTRYGSEEKGTY

SEQ ID NO: 72613 - protein, 221 aa, Neisseria meningitidis
CSSGGGGVAADIGAGLADALTAPLDHKDKGLQSLMLDQSVRKNEKLKLAAQGAEKTYGNGDSLNTGKLKNDKVSRFDFIRQIEVDGQLITLESGEFQIYKQNHSAVVALQIEKINNPDKIDSLINQRSFLVSGLGGEHTAFNQLPSGKAEYHGKAFSSDDPNGRLHYSIDFTKKQGYGRIEHLKTPEQNVELASAELKADEKSHAVILGDTRYGGEEKGTY

SEQ ID NO: 72614 - protein, 221 aa, Neisseria meningitidis
CSSGGGGVAADIGAGLADALTAPLDHKDKSLQSLTLDQSVRKNEKLKLAAQGAEKTYGNGDSLNTGKLKNDKVSRFDFIRQIEVDGQLITLESGEFQIYKQDHSAVVALQIEKINNPDKIDSLINQRSFLVSGLGGEHTAFNQLPDGKAEYHGKAFSSDDAGGKLTYTIDFAAKQGHGKIEHLKTPEQNVELAAAELKADEKSHAVILGDTRYGSEEKGTY

SEQ ID NO: 72615 - protein, 222 aa, Neisseria meningitidis
CSSGGGGVAADIGTGLADALTALPDHKDKGLQSLTLDQSVRKNEKLKLAAQGAEKTYGNGDSLNTGKLKNDKVSRFDFIHQIEVDGQLITLESGEFQVYKQSHSALTALQTEQEQDPEHSGKMVAKRRFKIGDIAGEHTSFDKLPKDVMATYRGTAFGSDDAGGKLTYTIDFAAKQGHGKIEHLKSPELNVELATAYIKPDEKHHAVISGSVLYNQDEKGSY

SEQ ID NO: 72616 - protein, 222 aa, Neisseria meningitidis
CSSGRGGVAADIGAGLADALTAPLDHKDKGLQSLTLDQSVRKNEKLKLAAQGAEKTYGNGDSLNTGKLKNDKVSRFDFIRQIEVDGQLITLESGEFQVYKQSHSALTALQTEQVQDSEDSGKMVAKRQFRIGDIAGEHTSFDKLPKGGSATYRGTAFSSDDAGGKLTYTIDFAAKQGHGKIEHLKSPELNVELATAYIKPDEKRHAVISGSVLYNQDEKGSY

SEQ ID NO: 72617 - protein, 222 aa, Neisseria meningitidis
CSSGGGGVAADIGAGLADALTAPLDHKDKGLQSLTLDQSVRKNEKLKLAAQGAEKTYGNGDSLNTGKLKNDKISRFDFIRQIEVDGQLITLESGEFQVYKQSHSALTALQTEQVQDSEDSGKMVAKRQFRIGDIAGEHTSFDKLPKGGSATYRGTAFGSDDAGGKLTYTIDFAAKQGHGKIEHLKSPELNVDLAAAYIKPDEKRHAVISGSVLYNQDEKGSY

SEQ ID NO: 72618 - protein, 222 aa, Neisseria meningitidis
CSSGGGGVAADIGAGLADALTAPLDHKDKGLQSLTLDQSVRKNEKLKLAAQGAEKTYGNGDSLNTGKLKNDKVSRFDFIRQIEVDGQLITLESGEFQVYKQSHSALTALQTEQVQDSEDSGKMVAKRQFRIGDIAGEHTSFDKLPKGGSATYRGTAFGSDDAGGKLTYTIDFAVKQGHGKIEHLKSPELNVDLAAAYIKPDKKRHAVISGSVLYNQDEKGSY

SEQ ID NO: 72619 - protein, 222 aa, Neisseria meningitidis
CSSGGGGVAADIGAGLADALTAPLDHKDKGLQSLMLDQSVRKNEKLKLAAQGAEKTYGNGDSLNTGKLKNDKVSRFDFIRQIEVDGQLITLESGEFQVYKQSHSALTALQTEQVQDSEDSGKMVAKRQFRIGDIAGEHTSFDKLPKGDSATYRGTAFSSDDAGGKLTYTIDFAAKQGHGKIEHLKSPELNVELATAYIKPDEKRHAVISGSVLYNQAEKGSY

SEQ ID NO: 72620 - protein, 222 aa, Neisseria meningitidis
CSSGGGGVAADIGAGLADALTAPLDHKDKGLQSLTLDQSVRKNEKLKLAAQGAEKTYGNGDSLNTGKLKNDKVSRFDFIRQIEVDGQLITLERGEFQVYKQSHSALTALQTEQVQDSEHSGKMVAKRQFRIGDIAGEHTSFDKLPEGGRATYRGTAFGSDDAGGKLTYTIDFAAKQGHGKIEHLKSPELNVDLVAADIKPDKKRHAVISGSVLYNQAEKGSY

SEQ ID NO: 72621 - protein, 227 aa, Neisseria meningitidis
CSSGGGGSGGGGVAADIGAGLADALTAPLDHKDKGLQSLTLDQSVRKNEKLKLAAQGAEKTYGNGDSLNTGKLKNDKISRFDFIRQIEVDGQLITLESGEFQVYKQSHSALTALQTEQEQDPEHSGKMVAKRRFKIGDIAGEHTSFDKLPKDVMATYRGTAFGSDDAGGKLTYTIDFAAKQGHGKIEHLKSPELNVELATAYIKPDEKHHAVISGSVLYNQDEKGSY

SEQ ID NO: 72622 - protein, 229 aa, Neisseria meningitidis
CSSGGGGSGGGGVAADIGTGLADALTAPLDHKDKGLKSLTLEDSIPQNGTLTLSAQGAEKTFKAGDKDNSLNTGKLKNDKISRFDFVQKIEVDGQTITLASGEFQIYKQNHSAVVALQIEKINNPDKIDSLINQRSFLVSGLGGEHTAFNQLPDGKAEYHGKAFSSDDPNGRLHYSIDFTKKQGYGRIEHLKTPEQNVELASAELKADEKSHAVILGDTRYGGEEKGTY

SEQ ID NO: 72623 - protein, 222 aa, Neisseria meningitidis
CSSGGGGVAADIGAGLADALTAPLDHKDKGLQSLMLDQSVRKNEKLKLAAQGAEKTYGNGDSLNTGKLKNDKVSRFDFIRQIEVDGQLITLESGEFQVYKQSHSALTAFQTEQVQDSEHSGKMVAKRQFRIGDITGEHTSFDKLPEGGRATYRGTAFGSDDAGGKLTYTIDFAAKQGHGKIEHLKSPELNVDLAAADIKPDKKRHAVISGSVLYNQAEKGSY

SEQ ID NO: 72624 - protein, 221 aa, Neisseria meningitidis
CSSGGGGVAADIGAGLADALTAPLDHKDKSLQSLTLDQSVRKNEKLKLAAQGAEKTYGNGDSLNTGKLKNDKVSRFDFIRQIEVDGQLITLESGEFQIYKQDHSAVVALQIEKINNPDKIDSLINQRSFLVSGLGGEHTAFNQLPSDKAEYHGKAFSSDDAGGKLTYTIDFAAKQGHGKIEHLKTPEQNVELASAELKADEKSHAVILGDTRYGGEEKGTY

SEQ ID NO: 72625 - protein, 222 aa, Neisseria meningitidis
CSSGGGGVAADIGAGLADALTAPLDHKDKGLQSLMLDQSVRKNEKLKLAAQGAEKTYGNGDSLNTGKLKNDKVSRFDFIRQIEVDGKLITLESGEFQVYKQSHSALTALQTEQVQDSEDSGKMVAKRQFRIGDIAGEHTSFDKLPKGGSATYRGTAFGSDDAGGKLTYTIDFAAKQGHGKIEHLKSPELNVELATAYIKPDEKRHAVISGSVLYNQDEKGSY

SEQ ID NO: 72626 - protein, 222 aa, Neisseria meningitidis
CSSGGGGVAADIGAGLADALTAPLDHKDKGLQSLMLDQSVRKNEKLKLAAQGAEKTYGNGDSLNTGKLKNDKVSRFDFIRQIEVDGQLITLESGEFQVYKQSHSALTALQTEQVQDSEHFGKMVAKRQFRIGDIAGEHTSFDKLPEGGRATYRGTAFGSDDAGGKLIYTIDFAAKQGHGKIEHLKSPELNVDLAAAYIKPDEKHHAVISGSVLYNQAEKGSY

SEQ ID NO: 72627 - protein, 222 aa, Neisseria meningitidis
CSSGGGSVAADIGAGLADALTAPLDHKDKGLQSLTLDQSVRKNEKLKLAAQGAEKTYGNGDSLNTGKLKNDKVSRFDFIRQIEVDGRLITLESGEFQVYKQTHSALTAFQTEQVQDSEHSGKMVAKRQFRIGDIAGEHTSFDKLPEGGRATYRGTAFGSDDVGGKLTYTIDFAAKQGHGKIEHLKSPELNVDLAAADIKPDEKRHAVISGSVLYNQDEKGSY

SEQ ID NO: 72628 - protein, 222 aa, Neisseria meningitidis
CSSGGGGVAADIGAGLADALTAPLDHKDKGLQSLMLDQSVRKNEKLKLAAQGAEKTYGNGDSLNTGKLKNDKVSRFDFIRQIEVDGQLITLESGEFQVYKQSHSALTALQTEQVQDSEHSGRMVAKRQFRIGDIAGEHTSFDKLPEGGRATYRGTAFGSDDAGGKLIYTIDFAAKQGHGKIEHLKSPELNVDLAAAYIKPDEKHHAVISGSVLYNQAEKGSY

SEQ ID NO: 72629 - protein, 222 aa, Neisseria meningitidis
CSSGGGGVAADIGAGLADALTAPLDHKDKGLQSLMLDQSVRKNEKLKLAAQGAEKTYGNGDSLNTGKLKNDKVSRFDFIRQIEVDGQLITLESGEFQVYKQSHSALTALQTEQVQDSEDSGKMVAKRQFRIGDIAGEHTSFDKLPKDVMVTYRGTAFGSDDAGGKLIYTIDFTNKQGYGRIEHLKTPEQNVELASAELKADEKSHAVILGDTRYGSEEKGTY

SEQ ID NO: 72630 - protein, 222 aa, Neisseria meningitidis
CSSGGGGVAADIGAGLADALTAPLDHKDKGLQSLTLDQSVRKNEKLKLAAQGAEKTYGNGDSLNTGKLKNDKISRFDFIRQIEVDGQLITLESGEFQVYKQSYSALTALQTEQVQDSEDSGKMVAKRQFRIGDIAGEHTSFDKLPKGGSATYRGTAFGSDDAGGKLTYTIDFAAKQGHGKIEHLKSPELNVELAAAYIKPDEKHHAVISGSVLYNQDEKGSY

SEQ ID NO: 72631 - protein, 221 aa, Neisseria meningitidis
CSSGGGGVAADIGAGLADALTAPLDHKDKGLQSLMLDQSVRKNEKLKLAAQGAEKTYGNGDSLNTGKLKNDKVSRFDFIRQIEVDGQLITLESGEFQIYKQDHSAVVALQIEKINNPDKIDSLINQRSFLVSGLGGEHTAFNQLPDGKAEYHGKAFSSDDAGGKLTYTIDFAAKQGHGKIEHLKTPEQNVELAAAELKADEKSHAVILGDTRYGSEEKGTY

SEQ ID NO: 72632 - protein, 222 aa, Neisseria meningitidis
CSSGGGGVAADIGAGLADALTAPLDHKDKGLQSLMLDQSVRKNEKLKLAAQGAEKTYGNGDSLNTGKLKNDKVSRFDFIRQIEVDGQLITLENGEFQVYKQSHSALTALQTEQVQDSEHSGKMVAKRQFRIGDIAGEHTSFDKLPEGGRATYRGTAFGSDDTGGKLTYTIDFAAKQGHGKIEHLKSPELNVELATAYIKPDEKRHAVISGSVLYNQDEKGSY

SEQ ID NO: 72633 - protein, 227 aa, Neisseria meningitidis
CSSGGGGSGGGGVAVDIGTGLADALTAPLDHKDKGLQSLTLDQSVRKNEKLKLAAQGAEKTYGNGDSLNTGKLKNDKISRFDFIRQIEVDGQLITLESGEFQVYKQSHSALTALQTEQVQDSEDSGKMVAKRQFRIGDIAGEHTSFDKLPKDVMATYRGTAFGSDDAGGKLTYTIDFAAKQGHGKIEHLKSPELNVELAAAYIKPDEKHHAVISGSVLYNQAEKGSY

SEQ ID NO: 72634 - protein, 222 aa, Neisseria meningitidis
CSSGGGGVAADIGAGLADALTAPLDHKDKGLQSLTLDQSVRKNEKLKLAAQGAEKTYGNGDSLNTGKLKNDKVSRFDFIRQIEVDGKLITLESGEFQVYKQSHSALTALQTEQVQDSEDSGKMVAKRQFRIGDIAGEHTSFDKLPKGGSATYRGTAFGSDDAGGKLIYTIDFAAKQGHGKIEHLKSPELNVDLAAAYIKPDEKHHAVISGSVLYNQAEKGSY

SEQ ID NO: 72635 - protein, 222 aa, Neisseria meningitidis
CSSGGGGVAADIGAGLADALTAPLDHKDKGLQSLMLDQSVRKNEKLKLAAQGAEKTYGNGDSLNTGKLKNDKVSRFDFIRQIEVDGQLITLESGEFQVYKQSHSALTALQTEQVQDSEDSGKMVAKRQFRIGDIAGEHTSFDKLPKGGSATYRGTAFGSDDAGGKLTYTIDFAAKQGHGKIEHLKSPELNVELATAYIKPDEKRHAVISGSVLYNQAEKGSY

SEQ ID NO: 72636 - protein, 222 aa, Neisseria meningitidis
CSSGGGGVAADIGAGLADALTAPLDHKDKGLQSLMLDQSVRKNEKLKLAAQGAEKTYGNGDSLNTGKLKNDKVSRFDFIRQIEVDGQLITLESGEFQVYKQSHSALTALQTEQVQDSEHSGKMVAKRQFRIGDIAGEHTSFDKLPEGGRATYRGTAFGSDDASGKLTYTIDFAAKQGHGKIEHLKSPELNVDLAAAYIKPDEKHHAVISGSVLYNQAEKGSY

SEQ ID NO: 72637 - protein, 221 aa, Neisseria meningitidis; identical to SEQ ID NO: 72521

SEQ ID NO: 72638 - protein, 222 aa, Neisseria meningitidis
CSSGGGGVAADIGAGLADALTAPLDHKDKGLQSLMLDQSVRKNEKLKLAAQGAEKTYGNGDSLNTGKLKNDKVSRFDFIRQIEVDGQLITLESGEFQVYKQSHSALTALQTEQVQDSEAFGKMVAKRQFRIGDIAGEHTSFDKLPEGGRATYRGTAFGSDDAGGKLIYTIDFAAKQGHGKIEHLKSPELNVDLAAAYIKPDEKHHAVISGSVLYNQAEKGSY

SEQ ID NO: 72639 - protein, 222 aa, Neisseria meningitidis
CSSGGGGVAADIGAGLADALTAPLDHKDKGLQSLTLDQSVRKNEKLKLAAQGAEKTYGNGDSLNTGKLKNDKVSRFDFIRQIEVDGQLITLESGEFQVYKQSHSALTALQTEQVQDSEHSGKMVAKRQFRIGDIAGEHTSFDKLPEGGRATYRGTAFGSDDAGGKLTYTIDFAAKQGHGKIEHLKSPELNVDLAAAYIKPDEKRHAVISGSVLYNQDEKGSY

SEQ ID NO: 72640 - protein, 222 aa, Neisseria meningitidis
CSSGGGGVAADIGAGLADALTAPLDHKDKSLQSLTLDQSVRKNEKLKLAAQGAEKTYGNGDSLNTGKLKNDKVSRFDFIHQIEVDGQLITLESGEFQVYKQSHSALTALQTEQEQDPEHSGKMVAKRRFKIGDIAGEHTSFDKLPKDVMATYRGTAFGSDDAGGKLTYTIDFAAKQGHGKIEHLKSPELNVELATAYIKPDEKHHAVISGSVLYNQDEKGSY

SEQ ID NO: 72641 - protein, 222 aa, Neisseria meningitidis
CSSGGGGVAADIGAGLADALTAPLDHKDKGLQSLMLDQSVRKNEKLKLAAQGAEKTYGNGDSLNTGKLKNDKVSRFDFIRQIEVDGQLITLESGEFQVYKQSHSALTALQTEQVQDSEHSGKMVAKRQFRIGDIAGEHTSFDKLPEGGRATYRGTAFGSDDASGKLTYTIDFAAKQGHGKIEHLKSPELNVDLAASDIKPDKKRHAVISGSVLYNQAEKGSY

SEQ ID NO: 72642 - protein, 222 aa, Neisseria meningitidis
CSSGGGGVAADIGAGLADALTAPLDHKDKGLQSLMLDQSVRKNEKLKLAAQGAEKTYGNGDSLNTGKLKNDKVSRFDFIRQIEVDGQLITLESGEFQVYKQSHSALTALQTDQVQDSEDSGKMVAKRQFRIGDIAGEHTSFDKLPKGDSATYRGTAFSSDDAGGKLTYTIDFAAKQGHGKIEHLKSPELNVELATAYIKPDEKRHAVISGSVLYNQDEKGSY

SEQ ID NO: 72643 - protein, 222 aa, Neisseria meningitidis
CSSGGVGVAADIGAGLADALTAPLDHKDKGLQSLTLDQSVRKNEKLKLAAQGAEKTYGNGDSLNTGKLKNDKVSRFDFIRQIEVDGQLITLESGEFQVYKQSHSALTAFQTEQIQDSEHSGKMVAKRQFRIGDIAGEHTSFDKLPEGGRATYRGTAFGSDDAGGKLTYTIDFAAKQGNGKIEHLKSPELNVDLAAADIKPDGKRHAVISGSVLYNQAEKGSY

SEQ ID NO: 72644 - protein, 222 aa, Neisseria meningitidis
CSSGGGGVAADIGAGLADALTAPLDHKDKGLQSLMLDQSVRKNEKLKLAAQGAEKTYGNGDSLNTGKLKNDKVSRFDFIRQIEVDGKLITLESGEFQVYKQSHSALTALQTEQVQDSEDSGKMVAKRQFRIGDIAGEHTSFDKLPEGGRATYRGTAFGSDDAGGKLIYTIDFAAKQGHGKIEHLKSPELNVDLAAAYIKPDEKHHAVISGSVLYNQAEKGSY

SEQ ID NO: 72645 - protein, 222 aa, Neisseria meningitidis
CSSGGGGVAADIGAGLADALTAPLDHKDKGLQSLMLDQSVRKNEKLKLAAQGAEKTYGNGDSLNTGKLKNDKVSRFDFIRQIEVDGQLITLESGEFQVYKQSHSALTALQTEQVQDSEHSVKMVAKRQFRIGDIAGEHTSFDKLPEGGRATYRGTAFGSDDAGGKLIYTIDFAAKQGHGKIEHLKSPELNVDLAAAYIKPDEKHHAVISGSVLYNQAEKGSY

SEQ ID NO: 72646 - protein, 222 aa, Neisseria meningitidis
CSSGGGGVAADIGAGLADALTAPLDHKDKGLQSLMLDQSVRKKEKLKLAAQGAEKTYGNGDSLNTGKLKNDKVSRFDFIRQIEVDGQLITLESGEFQVYKQSYSALTALQTEQEQDSEHSGKMVAKRRFRIGDIAGEHTSFDKLPKGSSATYRGTAFGSDDAGGKLTYTIDFAAKQGYGKIEHLKSPELNVDLAAADIKPDEKRHAVISGSVLYNQAEKGSY

SEQ ID NO: 72647 - protein, 222 aa, Neisseria meningitidis
CSSGGGGVAADIGAGLADALTAPLDHKDKGLQSLMLDQSVRKNEKLKLAAQGAEKTYGNGDSLNTGKLKNDKVSRFDFIRQIEVDGQLITLESGEFQVYKQSHSALTALQTEQVQDSEDSGKMVAKRQFRIGDIAGEHTSFDKLPEGGRATYRGTAFGSDDAGGKLIYTIDFAAKQGHGKIEHLKSPELNVDLAAAYIKPDEKHHAVISGSVLYNQAEKGSY

SEQ ID NO: 72648 - protein, 229 aa, Neisseria meningitidis
CSSGGGGSGGGGVAADIGAGLADALTAPLDHKDKGLKSLTLEDSIPQNGTLTLSAQGAEKTFKAGDKDNSLNTGKLKNDKISRFDFVQKIEVDGQTITLASGEFQIYKQDHSAVVALQIEKINNPDKIDSLINQRSFLVSGLGGEHTAFNQLPGGKAEYHGKAFSSDDAGGKLTYTIDFAAKQGHGKIEHLKTPEQNVELAAAELKADEKSHAVILGDTRYGSEEKGTY

SEQ ID NO: 72649 - protein, 217 aa, Neisseria meningitidis
VAADIGAGLADALTTPLDHKDKGLKSLTLEDSIPQNGTLTLSAQGAEKTFKAGDKDNSLNTGKLKNDKISRFDFVQKIEVDGQTITLASGEFQIYKQDHSAVVALQIEKINNPDKIDSLINQRSFLVSGLGGEHTAFNQLPGGKAEYHGKAFSSDDAGGKLTYTIDFAAKQGHGKIEHLKTPEQNVELAAAELKADEKSHAVILGDTRYGSEEKGTY

SEQ ID NO: 72650 - protein, 246 aa, Neisseria meningitidis
VNRTTFCSLSLTAALILTSCSSGGGGSGGGGVAADIGTGLADALTALPDHKDKGLQSLTLDQSVRKNEKLKLAAQGAEKTYGNGDSLNTGKLKNDKVSRFDFIHQIEVDGQLITLESGEFQVYKQSHSALTALQTEQEQDPEHSGKMVAKRRFKIGDIAGEHTSFDKLPKDVMATYRGTAFGSDDAGGKLTYTIDFAAKQGHGKIEHLKSPELNVELATAYIKPDEKHHAVISGSVLYNQDEKGSY

SEQ ID NO: 72651 - protein, 222 aa, Neisseria meningitidis
CSSGGGGVAADIGAGLADALTAPLDHKDKGLQSLTLDQSVRKNEKLKLAAQGAEKTYGNGDSLNTGKLKNDKVSRFDFIRQIEVDGQLITLESGEFQVYKQSHSALTALQTEQEQDLEHSGKMVAKRRFRIGDIAGEHTSFDKLREGGRATYRGTAFGSDDAGGKLTYTIDFAAKQGYGKIEHLKSPELNVDLAAADIKPDEKRHAVISGSVLYNQDEKGSY

SEQ ID NO: 72652 - protein, 221 aa, Neisseria meningitidis
CSSGGGGVAADIGAGLADALTTPLDHKDKSLQSLTLDQSVRKNEKLKLAAQGAEKTYGNGDSLNTGKLKNDKVSRFDFIRQIEVDGQTITLASGEFQIYKQNHSAVVALQIEKINNPDKIDSLINQRSFLVSGLGGEHTAFNQLPSGKAEYHGKAFSSDDPNGRLHYSIDFTKKQGYGRIEHLKTPEQNVELASAELKADEKSHAVILGDTRYGGEEKGTY

SEQ ID NO: 72653 - protein, 222 aa, Neisseria meningitidis
  misc_feature 201: 'Xaa' is any amino acid
CSSGGGGVAADIGAGLADALTAPLDHKDKGLQSLTLDQSVRKNEKLKLAAQGAEKTYGNGDSLNTGKLKNDKVSRFDFIRQIEVDGQLITLESGEFQVYKQSHSALTAFQTEQIQDSEHSGKMVAKRQFRIGDIAGEHTSFDKLPEGGRATYRGTAFGSDDAGGKLTYTIDFAAKQGNGKIEHLKSPELNVDLAAADIKPXGKRHAVISGSVLYNQAEKGSY

SEQ ID NO: 72654 - protein, 222 aa, Neisseria meningitidis; identical to SEQ ID NO: 72524

SEQ ID NO: 72655 - protein, 227 aa, Neisseria meningitidis
CSSGGGGSGGGGVAADIGAGLADALTAPLDHKDKGLQSLTLDQSVRKNEKLKLAAQGAEKTYGNGDSLNTGKLKNDKVSRFDFIHQIEVDGQLITLESGEFQVYKQSHSALTALQTEQEQDPEHSGKMVAKRRFKIGDIAGEHTSFDKLPKDVMATYRGTAFGSDDAGGKLTYTIDFAAKQGHGKIEHLKSPELNVELATAYIKPDEKHHAVISGSVLYNQDEKGSY

SEQ ID NO: 72656 - protein, 222 aa, Neisseria meningitidis
CSSGGGGVAADIGAGLADALTAPLDHKDKGLQSLTLDQSVRKNEKLKLAAQGAEKTYGNGDSLNTGKLKNDKVSRFDFIRQIEVDGQLITLESGEFQVYKQSHSALTAFQTEQIQDSEHSGKMVAKRRFRIGDIAGEHTSLDKLPKGGRATYRGTAFGSDDAGGKLTYTIDFAAKQGHGKIEHLKSPELNVDLAAADIKPDEKRHAVISGSVLYNQAEKGSY

SEQ ID NO: 72657 - protein, 222 aa, Neisseria meningitidis
CSSGGGGVAADIGAGLADALTAPLDHKDKGLQSLTLDQSVRKNEKLKLAAQGAEKTYGNGDSLNTGKLKNDKVSRFDFIRQIEVDGQLITLESGEFQVYKQSHSALTALQTEQVQDSEHSGKMVAKRQFRIGDIAGEHTSFDKLPEGVRATYRGTAFGSDDAGGKLTYTIDFAAKQGHGKIEHLKSPELNVDLAAADIKPDEKHHAVISGSVLYNQDEKGSY

SEQ ID NO: 72658 - protein, 229 aa, Neisseria meningitidis
CSSGGGGSGGGGVAADIGAGLADALTAPLDHKDKGLKSLTLEDSIPQNGTLTLSAQGAEKTFKAGDKDNSLNTGKLKNDKISRFDFVQKIEVDGQTITLASGEFQIYKQDHSAVVALQIEKINNPDKIDSLINQRSFLVSGLGGEHTAFNQLPSGKAEYHGKAFSSDDAGGKLTYTIDFAAKQGHGKIEHLKTPEQNVELASAELKADEKSHAVILGDTRYGSEEKGTY

SEQ ID NO: 72659 - protein, 222 aa, Neisseria meningitidis
CSSGGGGVAADIGTGLADALTAPLDYKDKGLQSLMLDQSVRKNEKLKLSAQGAEKTYGNGDSLNTGKLKNDKVSRFDFIRQIEVDGQLITLESGEFQVYKQSHSALTALQTEQVQDSEDSGKMVAKRQFRIGDIAGEHTSFDKLPKGGSATYRGTAFGSDDAGGKLTYTIDFAAKQGHGKIEHLKSPELNVELAAAYIKPDEKRHAVISGSVLYNQDEKGSY

SEQ ID NO: 72660 - protein, 247 aa, Neisseria meningitidis
VNRTAFCCLFLTTALILTACSSGGGGSGSGGVAADIGTGLADALTTPLDHKDKGLKSLTLEDSIPQNGTLTLSAQGAEKTFKAGDKDNSLNTGKLKNDKISRFDFVQKIEVDGQTITLASGEFQIYKQDHSAVVALQIEKINNPDKIDSLINQRSFLVSGLGGEHTAFNQLPGKAEYHGKAFSSDDAGGKLTYTIDFAAKQGHGKIEHLKTPEQNVELAAAELKADEESHAVILGDTRYGSEEKGTY

SEQ ID NO: 72661 - protein, 224 aa, Neisseria meningitidis
CSSGGGGGGVAADIGTGLADALTAPLDHKDKGLQSLTLDQSVRKNEKLKLAAQGAEKTYGNGDSLNTGKLKNDKVSRFDFIHQIEVDGQLITLESGEFQVYKQSHSALTALQTEQEQDPEHSGKMVAKRRFKIGDIAGEHTSFDKLPKDVMATYRGTAFGSDDAGGKLTYTIDFAAKQGHGKIEHLKSPELNVELATAYIKPDEKHHAVISGSVLYTQDEKGSY

SEQ ID NO: 72662 - protein, 249 aa, Neisseria meningitidis
VNRTTFCCLSLTAALILTACSSGGSGSGGGGVAADIGAGLADALTAPLDHKDKGLKSLTLEDSISQNGTLTLSAQGAERTFKAGDKDNSLNTGKLKNDKISRFDFIRQIEVDGQLITLESGEFQVYKQSHSALTALQTEQVQDSEHSGKMVAKRQFRIGDIVGEHTSFGKLPKDVMATYRGTAFGSDDAGGKLTYTIDFAAKQGHGKIEHLKSPELNVDLAAADIKPDEKHHAVISGSVLYNQAEKGSY

SEQ ID NO: 72663 - protein, 243 aa, Neisseria meningitidis
VNRTAFCCFSLTAALILTACSSGGGGVAADIGAGLADALTAPLDHKDKGLKSLTLEDSIPQNGTLTLSAQGAEKTFKAGDKDNSLNTGKLKNDKISRFDFVQKIEVDGQTITLASGEFQIYKQDHSAVVALQIEKINNPDKIDSLINQRSFLVSGLGGEHTAFNQLPGGKAEYHGKAFSSDDAGGKLTYTIDFAAKQGHGKIEHLKTPEQNVELAAAELKADEKSHAVILGDTRYGSEEKGTY

SEQ ID NO: 72664 - protein, 248 aa, Neisseria meningitidis
VNRTAFCCLFLTTALILTACSSGGGGSGSGGVAADIGTGLADALTTPLDHKDKGLKSLTLEDSIPQNGTLTLSAQGAEKTFKAGDKDNSLNTGKLKNDKISRFDFVQKIEVDGQTITLASGEFQIYKQDHSAVVALQIEKINNPDKIDSLINQRSFLVSGLGGEHTAFNQLPSGKAEYHGKAFSSDDAGGKLTYTIDFAAKQGHGKIEHLKTPEQNVELAAAELKADEKSHAVILGDTRYGSEEKGTY

SEQ ID NO: 72665 - protein, 246 aa, Neisseria meningitidis
VNRTTFCCLSLTTALILTACSSGGGGSGGGGVAADIGAGLADALTAPLDHKDKGLQSLTLDQSVRKNEKLKLAAQGAEKTYGNGDSLNTGKLKNDKVSRFDFIRQIEVDGQLITLESGEFQVYKQSHSALTALQTEQEQDPEHSGKMVAKRRFKIGDIAGEHTSFDKLPKDVMATYRGTAFGSDDAGGKLTYTIDFAAKQGHGKIEHLKSPELNVDLAAAYIKPDEKRHAVISGSVLYNQDEKGSY

SEQ ID NO: 72666 - protein, 241 aa, Neisseria meningitidis
VNRTAFCCLSLTTALILTACSSGGGGVAADIGAGLADALTAPLDHKDKGLQSLTLDQSVRKNEKLKLAAQGAEETYGNGDSLNTSKLKNDKVSRFDFIRQIEVDGQLITLESGEFQVYKQSHSALTALQTEQVQDSEHSGKMVAKRQFRIGDIAGEHTSFDKLPEGGMATYRGTAFGSDDADGKLTYTIDFAAKQGHGKIEHLKSPELNVDLAAAYIKPDEKHHAVISGSVLYNQDEKGSY

SEQ ID NO: 72667 - protein, 241 aa, Neisseria meningitidis; identical to SEQ ID NO: 72449

SEQ ID NO: 72668 - protein, 241 aa, Neisseria meningitidis
VNRTAFCCFSLTAALILTACSSGGGGVAADIGAGLADALTAPLDHKDKSLQSLTLDQSVRKNEKLKLAAQGAEKTYGNGDSLNTGKLKNDKVSRFDFIRQIEVDGQLITLESGEFQVYKQSHSALTALQTEQEQDPEHSGKMVAKRRFKIGDIAGEHTSFDKLPKDVMATYRGTAFGSDDAGGKLTYTIDFAAKQGHGKIEHLKSPELNVELATAYIKPDEKHHAVISGFVLYNQDEKGSY

SEQ ID NO: 72669 - protein, 240 aa, Neisseria meningitidis
VNRTTFCCLSLTAALILTACSSGGGGVAADIGAGLADALTAPLDHKDKSLQSLTLDQSVRKNEKLKLAAQGAEKTYGNGDSLNTGKLKNDKVSRFDFIRQIEVDGQLITLESGEFQIYKQDHSAVVALQIEKINNPDKIDSLINQRSFLVSGLGGEHTAFNQLPDGKAEYHGKAFSSDDAGGKLTYTIDFAAKQGHGKIEHLKTPEQNVELAAAELKADEKSHAVILGDTRYGSEEKGTY

SEQ ID NO: 72670 - protein, 241 aa, Neisseria meningitidis
VNRTAFCCLSLTTALILTACSSGGGGVAADIGAGLADALTAPLDHKDKGLQSLTLDQSVRKNEKLKLAAQGAEKTYGNGDSLNTGKLKNDKVSRFDFIRQIEVDGQLITLESGEFQVYKQSHSALTAFQTEQIQDSEHSGKMVAKRQFRIGDIAGEHTSFDKLPEGGRATYRGTAFGSDDAGGKLIYTIDFAAKQGHGKIEHLKSPELNVDLAAAYIKPDEKHHAVISGSVLYNQAEKGSY

SEQ ID NO: 72671 - protein, 241 aa, Neisseria meningitidis
VNRTAFCCLSLTTALILTACSSGGGGVAADIGAGLADALTAPLDHKDKGLQSLTLDQSVRKNEKLKLAAQGAEKTYGNGDSLNTGKLKNDKVSRFDFIRQIEVDGQLITLESGEFQVYKQSHSALTAFQTEQIQDSEHSGKMVAKRRFRIGDIAGEHTSFDKLPEGGRATYRGTAFGSDDAGGKLTYTIDFAAKQGHGKIEHLKSPELNVDLAAADIKPDEKHHAVISGSVLYNQDEKGSY

SEQ ID NO: 72672 - protein, 241 aa, Neisseria meningitidis
VNRTAFCCLSLTAALILTACSSGGGGVAADIGAGLADALTAPLDHKDKGLQSLTLDQSVRKKEKLKLAAQGAEKTYGNGDSLNTGKLKNDKVSRFDFIRQIEVDGQLITLESGEFQVYKQSHSALTAFQTEQIQDSEHSGKMVAKRQFRIGDIAGEHTSFDKLPEGGRATYRGTAFGSDDAGGKLTYTIDFAAKQGNGKIEHLKSPELNVDLAAADIKPDGKRHAVISGSVLYNQAEKGSY

SEQ ID NO: 72673 - protein, 241 aa, Neisseria meningitidis
VNRTAFCCLSLTTALILTACSSGGGGVAADIGAGLADALTAPLDHKDKGLQSLMLDQSVRKNEKLKLAAQGAEKTYGNGDSLNTGKLKNDKVSRFDFIRQIEVDGQLITLESGEFQVYKQSHSALTAFQTEQVQDSEHSGKMVAKRQFRIGDITGEHTSFDKLPEGGRATYRGTAFGSDDAGGKLTYTIDFAAKQGHGKIEHLKSPELNVDLAAADIKPDKKRHAVISGSVLYNQAEKGSY

SEQ ID NO: 72674 - protein, 241 aa, Neisseria meningitidis
VNRTTFCCLSLTTALILTACSSGGGGVAADIGAGLADALTAPFDHKDKGLQSLTLDQSVRKNEKLKLAAQGAEKTYGNGDSLNTGKLKNDKVSRFDFIRQIEVDGQLITLESGEFQVYKQSHSALTALQTEQVQDSEHSGKMVAKRQFRIGDIAGEHTSFDKLPEGGRATYRGTAFGSDDAGGKLTYTIDFAAKQGHGKIEHLKSPELNVDLAAADIKPDEKRHAVISGSVLYNQVEKGSY

SEQ ID NO: 72675 - protein, 241 aa, Neisseria meningitidis
VNRTTFCCLSLTAALILTACSSGGGGVAADIGAGLADALTAPLDHKDKGLQSLTLDQSVRKNEKLKLAAQGAEKTYGNGDSLNTGKLKNDKISRFDFIRQIEVDGQLITLESGEFQVYKQSHSALTALQTEQVQDSEDSGKMVAKRQFRIGDIAGEHTSFDNLPKGGSATYRGTAFSSDDAGGKLTYTIDFAAKQGHGKIEHLKSPELNVELATAYIKPDEKHHAVISGSVLYNQDEKGSY

SEQ ID NO: 72676 - protein, 241 aa, Neisseria meningitidis
VNRTAFCCFSLTAALILTACSSGGGGVAADIGAGLADALTAPLDHKDKGLQSLTLDQSVRKNEKLKLAAQGAEKTYGNGDSLNTGKLKNDKVSRFDFIRQIEVDGQLITLESGEFQVYKQSHSALTAFQTEQIQDSEHSGKMVAKRQFRIGDIAGEHTSFDKLPEGGRATYRGTAFGSDDAGGKLTYTIDFAAKQGNGKIEHLKSPELNVDLAAADIKPDGKRHAVISGSVLYNQAEKGSY

SEQ ID NO: 72677 - protein, 248 aa, Neisseria meningitidis
VNRTTFCCLSLTAALILTACSSGGGGSGGGGVAADIGTGLADALTAPLDHKDKGLKSLTLEDSIPQNGTLTLSAQGAEKTFKAGDKDNSLNTGKLKNDKISRFDFVQKIEVDGQTITLASGEFQIYKQDHSAVVALQIEKINNPDKIDSLINQRSFLVSGLGGEHTAFNQLPGGKAEYHGKAFSSDDPNGRLHYSIDFTKKQGYGRIEHLKTPEQNVELASAELKADEKSHAVILGDTRYGSEEKGTY

SEQ ID NO: 72678 - protein, 246 aa, Neisseria meningitidis
VNRTAFCCLFLTTALILTACSSGGGGSGGGGVAADIGTGLADALTAPLDHKDKGLQSLTLDQSVRKNEKLKLAAQGAEKTYGNGDSLNTGKLKNDKISRFDFIRQIEVDGQLITLESGEFQVYKQSHSALTALQTEQVQDSEDSGKMVAKRQFRIGDIAGEHTSFDKLPKGGSATYRGTAFGSDDAGGKLTYTIDFAAKQGHGKIEHLKSPELNVDLAAAYIKPDEKRHAVISGSVLYNQDEKGSY

SEQ ID NO: 72679 - protein, 241 aa, Neisseria meningitidis
VNRTAFCCLSLTTALILTACSSGGGGVVADIGAGLADALTAPLDHKDKGLQSLMLDQSVRKNEKLKLAAQGAEKTYGNGDILNTGKLKNDKVSRFDFIRQIEVDGQLITLESGEFQVYKQSHSALTALQTEQVQDSEHSGKMVAKRRFRIGDIAGEHTSFDKLPKDGMATYRGTAFGSDDAGGKLTYIIDFAAKQGYGKIEHLKSPELNVDLAAANIEQDEKHHAVISGSVLYNQAEKGSY

SEQ ID NO: 72680 - protein, 241 aa, Neisseria meningitidis; identical to SEQ ID NO: 72381

SEQ ID NO: 72681 - protein, 246 aa, Neisseria meningitidis; identical to SEQ ID NO: 72506

SEQ ID NO: 72682 - protein, 246 aa, Neisseria meningitidis
VNRTTFCCLSLTAALILTACSSGGGGSGGGGVAADIGTGLADALTAPLDHKDKGLQSLTLDQSVRKNEKLKLAAQGAEKTYGNGDSLNTGKLKNDKISRFDFIRQIEVDGQLITLESGEFQVYKQSHSALTALQTEQVQDSEHSEKMVAKRQFRIGDIAGEHTSFDKLPKSGSATYRGTAFGSDDAGGKLTYTIDFVAKQGHGKIEHLKSPELNVDLAAAYIKPDKKRHAVISGSVLYNQNEKGSY

SEQ ID NO: 72683 - protein, 244 aa, Neisseria meningitidis
VNRTAFCCLSLTAALILTACSSGGGGVAADIGAGLADVLTAQLDHKDKGLQSLTLDQSVRKNEKLKLAAQGAEKTFKAGDKDNSLNTGKLKNDKISRFDFIRQIEVDGQLITLESGEFQIYKQSHSALTAFQTEQIQDSEHSGKMVAKRQFRIGDIAGEHTSFDKLPEGGRATYRGTAFGSDDAGGKLTYTIDFAAKQGNGKIEHLKSPELNVDLAAADIKPDGKRHAVISGSVLYNQAEKGSY

SEQ ID NO: 72684 - protein, 241 aa, Neisseria meningitidis
VNRTAFCCLSLTAALILTACSSGGGGVAADIGAGLADALTAPLDHKDKGLQSLTLDQSVRKNEKLKLAAQGAEKTYGNGDSLNTGKLKNDKVSRFDFIRQIEVDGQLITLESGEFQVYKQSHSALTALQTEQVQDSEHSGKMVAKRQFRIGDIAGEHTSFDKLPEGGRATYRGTAFGSDDAGGKLTYTIDFAAKQGHGKIEHLKSPELNVDLAAAYIKPDEKRHAVISGSVLYNQDEKGSY

SEQ ID NO: 72685 - protein, 241 aa, Neisseria meningitidis; identical to SEQ ID NO: 72420

SEQ ID NO: 72686 - protein, 273 aa, Neisseria meningitidis
VNRTAFCCLSLTTALILTACSSGGGGVAADIGAGLADALTAPLDHKDKGLQSLMLDQSVRKNEKLKLAAQGAEKTYGNGDSLNTGKLKNDKVSRFDFIRQIEVDGQLITLESGEFQIYKQDHSAVVALQIEKINNPDKIDSLINQRSFLVSGLGGEHTAFNQLPSGKAEYHGKAFSSDDAGGKLTYTIDFAAKQGHGKIEHLKTPEQNVELASAELKADEKSHAVILGDTRYGGEEKGTYHLALFGDRAQEIAGSATVKIREKVHEIGIAGKQ

SEQ ID NO: 72687 - protein, 274 aa, Neisseria meningitidis
VNRTAFCCLSLTTALILTACSSGGGGVAADIGAGLADALTAPLDHKDKGLQSLMLDQSVRKNEKLKLAAQGAEKTYGNGDSLNTGKLKNDKVSRFDFIRQIEVDGQLITLESGEFQVYKQSHSALTALQTEQVQDSEQFGKMVAKRQFRIGDIAGEHTSFDKLPEGGRATYRGTAFGSDDAGGKLIYTIDFAAKQGHGKIEHLKSPELNVDLAAAYIKPDEKHHAVISGSVLYNQAEKGSYSLGIFGGKAQEVAGSAEVKTVNGIRHIGLAAKQ

SEQ ID NO: 72688 - protein, 281 aa, Neisseria meningitidis
VNRTAFCCLSLTTALILTACSSGGGGSGGGGVAADIGTGLADALTTPLDHKDKGLKSLTLEDSIPQNGTLTLSAQGAEKTFKAGDKDNSLNTGKLKNDKISRFDFVQKIEVDGQTITLASGEFQIYKQDHSAVVALQIEKINNPDKIDSLINQRSFLVSGLGGEHTAFNQLPGGKAEYHGKAFSSDDPNGRLHYSIDFTKKQGYGRIEHLKTLEQNVELAAAELKADEKSHAVILGDTRYGSEEKGTYHLALFGDRAQEIAGSATVKIGEKVHEIGIAGKQ

SEQ ID NO: 72689 - protein, 274 aa, Neisseria meningitidis
VNRTAFCCLSLTAALILTACSSGGGGVAADIGAGLADALTAPLDHKDKSLQSLTLDQSVRKNEKLKLAAQGAEKTYGNGDSLNTGKLKNDKVSRFDFIRQIEVDGQLITLESGEFQVYKQSHSALTALQTEQVQDSEHSGKMVAKRQFRIGDIAGEHTSFDKLPEGGRATYRGTAFGSDDASGKLTYTIDFAAKQGHGKIEHLKSPELNVDLAASDIKPDKKRQAVISGSVLYNQAEKGSYSLGIFGGQAQEVAGSAEVETANGIRHIGLAAKQ

SEQ ID NO: 72690 - protein, 279 aa, Neisseria meningitidis
VNRTTFCCLSLTTALILTACSSGGGGSGGGGVAADIGAGLADALTAPLDHKDKGLQSLTLDQSVRKNEKLKLSAQGAEKTYGNGDSLNTGKLKNDKISRFDFIRQIEVDGQLITLESGEFQVYKQSHSALTALQTEQEQDPEHSEKMVAKRRFKIGDIAGEHTSFDKLPKDVMATYRGTAFGSDDAGGKLTYTIDFAAKQGHGKIEHLKSPELNVDLAAADIKPDEKHHAVISGSVLYNQDEKGSYSLGIFGGQAQEVAGSAEVETANGIQHIGLAAKQ

SEQ ID NO: 72691 - protein, 273 aa, Neisseria meningitidis
VNRTAFCCLSLTAALILTACSSGGGGVAADIGAGLADALTAPLDHKDKGLQSLMLDQSVRKNEKLKLAAQGAEKTYGNGDSLNTGKLKNDKVSRFDFIRQIEVDGQLITLESGEFQIYKQDHSAVVALQIEKINNPDKIDSLINQRSFLVSGLGGEHTAFNQLPSGKAEYHGKAFSSDDAGGKLTYTIDFAAKQGHGKIEHLKTPEQNVELASAELKADEKSHAVILGDTRYGGEEKGTYHLALFGDRAQEIAGSATVKIREKVHEIGIAGKQ

SEQ ID NO: 72692 - protein, 279 aa, Neisseria meningitidis
VNRTTFCCLSLTAALILTACSSGGGGSGGGGVAADIGTGLADALTAPLDHKDKGLQSLTLDQSVRKNEKLKLAAQGAEKTYGNGDSLNTGKLKNDKISRFDFIRQIEVDGQLITLESGEFQVYKQSHSALTALQTEQEQDLEHSGKMVAKRRFRIGDIAGEHTSFDKLREGGRATYRGTAFGSDDAGGKLTYTIDFAAKQGYGKIEHLKSPELNVDLAAADIKPDEKRHAVISGSVLYNQDEKGSYSLGIFGGQAQEVAGSAEVETANGIHHIGLAAKQ

SEQ ID NO: 72693 - protein, 274 aa, Neisseria meningitidis
VNRTTFCCLSLTAALILTACSSGGGGVAADIGAGLADALTAPLDHKDKGLQSLTLDQSVRKNEKLKLAAQGAEKTYGNGDSLNTGKLKNDKVSRFDFIRQIEVDGQLITLESGEFQVYKQSHSALTALQTEQVQDSEDSGKMVAKRQFRIGDIAGEHTSFDKLPKDVMATYRGTAFGSDDAGGKLTYTIDFAAKQGHGKIEHLKSPELNVELAAAYIKPDEKRHAVISGSVLYNQDEKGSYSLGIFGGQAQEVAGSAEVKTVNGIRHIGLAAKQ

SEQ ID NO: 72694 - protein, 274 aa, Neisseria meningitidis
VNRTAFCCLSLTTALILTACSSGGGGVAADIGAGLADALTAPLDHKDKGLQSLTLDQSVRKNEKLKLAAQGAEKTYGNGDSLNTGKLKNDKVSRFDFIRQIEVDGQLITLESGEFQVYKQSHSALTAFQTEQIQDSEHSGKMVAKRQFRIGDIAGEHTSFDKLPEGGRATYRGTAFSSDDAGGKLTYTIDFAAKQGHGKIEHLKSPELNVDLAAADIKPDEKHHAVISGSVLYNQDEKGSYSLGIFGGKAQEVAGSAEVKTVNGIRHIGLAAKQ

SEQ ID NO: 72695 - protein, 273 aa, Neisseria meningitidis
VNRTAFCCFSLTAALILTACSSGGGGVAADIGAGLADALTAPLDHKDKGLQSLTLDQSVRKNEKLKLAAQGAEKTYGNGDSLNTGKLKNDKVSRFDFIRQIEVDGKLITLESGEFQIYKQDHSAVVALQIEKINNPDKIDSLINQRSFLVSGLGGEHTAFNQLPDGKAEYHGKAFSSDDAGGKLTYTIDFAAKQGHGKIEHLKTPEQNVELAAAELKADEKSHAVILGDTRYGSEEKGTYHLALFGDRAQEIAGSATVKIGEKVHEIGIAGKQ

SEQ ID NO: 72696 - protein, 274 aa, Neisseria meningitidis
VNRTAFCCFSLTAALILTACSSGGGGVAADIGAGLADALTTPLDHKDKSLQSLTLDQSVRKNEKLKLAAQGAEKTYGNGDSLNTGKLKNDKVSRFDFIRQIEVDGQLITLESGEFQVYKQSHSALTALQTEQEQDPEHSGKMVAKRRFKIGDIAGEHTSFDKLPKDVMATYRGTAFGSDDAGGKLTYTIDFAAKQGHGKIEHLKSPELNVELATAYIKPDEKHHAVISGSVLYNQDEKGSYSLGIFGGQAQEVAGSAEVETANGIHHIGLAAKQ

SEQ ID NO: 72697 - protein, 274 aa, Neisseria meningitidis
VNRTAFCCLSLTTALILTACSSGGGGVAADIGAGLADALTAPLDHKDKGLQSLMLDQSVRKNEKLKLAAQGAEKTYGNGDSLNTGKLKNDKVSRFDFIRQIEVDGQLITLEIGEFQVYKQSHSALTALQTEQVQDSEHSGSMVAKRQFRIGDIAGEHTSFDKLPEGGRATYRGTAFGSDDAGGKLIYTIDFAAKQGHGKIEHLKSPELNVDLAAAYIKPDEKHHAVISGSVLYNQAEKGSYSLGIFGGKAQEVAGSAEVKTVNGIRHIGLAAKQ

SEQ ID NO: 72698 - protein, 273 aa, Neisseria meningitidis
VNRTAFCCLSLTAALILTACSSGGGGVAADIGAGLADALTAPLDHKDKSLQSLTLDQSVRKNEKLKLAAQGAEKTYGNGDSLNTGKLKNDKVSRFDFIRQIEVDGQLITLESGEFQIYKQDHSAVVALQIEKINNPDKIDSLINQRSFLVSGLGGEHTAFNQLPDGKAEYHGKAFSSDDAGGKLTYTIDFAAKQGHGRIEHLKTPEQNVELASAELKADEKSHAVILGDTRYGGEEKGTYHLALFGDRAQEIAGSATVKIREKVHEIGIAGKQ

SEQ ID NO: 72699 - protein, 282 aa, Neisseria meningitidis
VNRTTFCCLSLTAALILTACSSGGGGSGGGGVTADIGTGLADALTAPLDHKDKGLQSLTLDQSVRKNEKLKLAAQGAEKTYGNGDSLNTGKLKNDKVSRFDFIRQIEVDGRLITLESGEFQVYKQSHSALTALQTEQVQDSEDSGKMVAKRRFRIGDIAGEHTSFDKLPKGGSATYRGTAFGSDDAGGKLTYTIDFAVKQGHGKIEHLKSPELNVELATADIKPDEKHHAVISGSVLYNQDEKGSYSLGIFGGQAQEVAGSAEVETANGIHHIGLAAKQQPL

SEQ ID NO: 72700 - protein, 274 aa, Neisseria meningitidis
VNRTTFCCLSLTAALILTACSSGGGGVAADIGAGLADALTAPLDHKDKGLQSLTLDQSVRKNEKLKLAAQGAEKTYGNGDSLNTGKLKNDKVSRFDFIRQIEVDGQLITLESGEFQVYKQSHSALTALQTEQVQDSEHSGKMVAKRQFRIGDIAGEHTSFDKLPEGVRATYHGTAFGSDDAGGKLTYTIDFAAKQGHGKIEHLKSPELNVDLAAADIKPDEKHHAVISGSVLYNQDEKGSYSLGIFGGKAQEVAGSAEVKTVNGIRHIGLAAKQ

SEQ ID NO: 72701 - protein, 273 aa, Neisseria meningitidis
VNRTAFCCLSLTAALILTACSSGGGGVAADIGAGLADALTAPLDHKDKSLQSLTLDQSVRKNEKLKLAAQGAEKTYGNGDSLNTGKLKNDKVSRFDFIRQIEVDGQLITLESGEFQIYKQNHSAVVALQIEKINNPDKIDSLINQRSFLVSGLGGEHTAFNQLPDGKAEYHGKAFSSDDAGGKLTYTIDFAAKQGHGKIEHLKTPEQNVELAAAELKADEKSHAVILGDTRYGSEEKGTYHLALFGDRAQEIAGSATVKIGEKVHEIGIAGKQ

SEQ ID NO: 72702 - protein, 279 aa, Neisseria meningitidis
VNRTAFCCLSLTTALILTACSSGGGGSGGGGVAADIGTGLADALTAPLDHKDKGLQSLTLDQSVRKNEKLKLAAQGAEKTYGNGDSLNTGKLKNDKISRFDFIRQIEVDGQLITLESGEFQVYKQSYSALTALQTEQVQDSEHSEKMVAKRQFRIGDIAGEHTSFDKLPKSGRATYRGTAFGSDDAGGKLIYTIDFAAKQGHGKIEHLKSPELNVELATAYIKPDEKHHAVISGSVLYNQDEKGSYSLGIFGGQAQEVAGSAEVETANGIRHIGLAAKQ

SEQ ID NO: 72703 - protein, 362 aa, Neisseria meningitidis; identical to SEQ ID NO: 7577

SEQ ID NO: 72704 - protein, 391 aa, Neisseria meningitidis
MKHFPSKVLTTAILATFCSGALAATNDDDVKKAATVAIAAAYNNGQEINGFKAGETIYDIDEDGTITKKDATAADVEADDFKGLGLKKVVTNLTKTVNENKQNVDAKVKAAESEIEKLTTKLADTDAALDATTNALNKLGENITTFAEETKTNIVKIDEKLEAVADTVDKHAEAFNDIADSLDETNTKADEAVKTANEAKQTAEETKQNVDAKVKAAETAAGTANTAADKAEAVAAKVTDIKADIATNKDNIAKKANSADVYTREESDSKFVRIDGLNATTEKLDTRLASAEKSITEHGTRLNGLDRTVSDLRKETRQGLAEQAALSGLFQPYNVGRFNVTAAVGGYKSESAVAIGTGFRFTENFAAKAGVAVGTSSGSSAAYHVGVNYEW

SEQ ID NO: 72705 - protein, 398 aa, Neisseria meningitidis; identical to SEQ ID NO: 11476

SEQ ID NO: 72706 - protein, 398 aa, Neisseria meningitidis
MKHFPSKVLTTAILATFCSGALAATNDDDVKKAATVAIAAAYNNGQKINGFKAGETIYDIDEDGTITKKDATAADVEADDFKGLGLKKVVTNLTKTVNENKQNVDAKVKAAESEIEKLTTKLADTDAALDATTNALNKLGENITTFAEETKTNIVKIDEKLEAVADTVDKHAEAFNDIADSLDETNTKADEAVKTANEAKQTAEETKQNVDAKVKAAETAAGKAEAAAGTANTAADKAEAVAAKVTDIKADIATNKDNIAKKANSADVYTREESDSKFVRIDGLNATTEKLDTRLASAEKSITEHGTRLNGLDRTVSDLRKETRQGLAEQAALSGLFQPYNVGRFNVTAAVGGYKSESAVAIGTGFRFTENFAAKAGVAVGTSSGSSAAYHVGVNYEW

SEQ ID NO: 72707 - protein, 398 aa, Neisseria meningitidis
MKHFQSKVLTAAILATFCSGALAATNDDDVKKAATVAIAAAYNNGQEINGFKAGETIYDIDEDGTITKKDATAADVEADDFKGLGLKKVVTNLTKTVNENKQNVDAKVKAAESEIEKLTTKLADTDAALDATTNALNKLGENITTFAEETKTNIVKIDEKLEAVADTVDKHAEAFNDIADSLDETNTKADEAVKTANEAKQTAEETKQNVDAKVKAAETAAGKAEAAAGTANTAADKAEAVAAKVTDIKADIATNKDNIAKKANSADVYTREESDSKFVRIDGLNATTEKLDTRLASAEKSITEHGTRLNGLDRTVSDLRKETRQGLAEQAALSGLFQPYNVGRFNVTAAVGGYKSESAVAIGTGFRFTENFAAKAGVAVGTSSGSSAAYHVGVNYEW

SEQ ID NO: 72708 - protein, 405 aa, Neisseria meningitidis
MKHFPSKVLTTAILATFCSGALAATNDDDVKKAATVAIAAAYNNGQEINGFKAGETIYDIDEDGTITKKDATAADVEADDFKGLGLKKVVTNLTKTVNENKQNVDAKVKAAESEIEKLTTKLADTDAALADTDAALDATTNALNKLGENITTFAEETKTNIVKIDEKLEAVADTVDKHAEAFNDIADSLDETNTKADEAVKTANEAKQTAEETKQNVDAKVKAAETAAGKAEAAAGTANTAADKAEAVAAKVTDIKADIATNKDNIAKKANSADVYTREESDSKFVRIDGLNATTEKLDTRLASAEKSITEHGTRLNGLDRTVSDLRKETRQGLAEQAALSGLFQPYNVGRFNVTAAVGGYKSESAVAIGTGFRFTENFAAKAGVAVGTSSGSSAAYHVGVNYEW

SEQ ID NO: 72709 - protein, 405 aa, Neisseria meningitidis
MQHFPSKVLTTAILATFCSGALAATNDDDVKKAATVAIAAAYNNGQEINGFKAGETIYDIDEDGTITKKDATAADVEADDFKGLGLKKVVTNLTKTVNENKQNVDAKVKAAESEIEKLTTKLADTDAALADTDAALDATTNALNKLGENITTFAEETKTNIVKIDEKLEAVADTVDKHAEAFNDIADSLDETNTKADEAVKTANEAKQTAEETKQNVDAKVKAAETAAGKAEAAAGTANTAADKAEAVAAKVTDIKADIATNKDNIAKKANSADVYTREESDSKFVRIDGLNATTEKLDTRLASAEKSIADHDTRLNGLDKTVSDLRKETRQGLAEQAALSGLFQPYNVGRFNVTAAVGGYKSESAVAIGTGFRFTENFAAKAGVAVGTSSGSSAAYHVGVNYEW

SEQ ID NO: 72710 - protein, 405 aa, Neisseria meningitidis; identical to SEQ ID NO: 12893

SEQ ID NO: 72711 - protein, 405 aa, Neisseria meningitidis
MKHFPSKVLTTAILATFCSGALAATNDDDVKKAATVAIAAAYNNGQEINGFKAGETIYDIDEDGTITKKDATAADVEADDFKGLGLKKVVTNLTKTVNENKQNVDAKVKAAESEIEKLTTKLADTDAALADTDAALDATTNALNKLGENITTFAEETKTNIVKIDEKLEAVADTVDKHAEAFNDIADSLDETNTKADEAVKTANEAKQTAEETKQNVDAKVKAAETAAGKAEAAAGTANTAADKAEAVAAKVTDIKADIATNKDNIAKKANSADVYTREESDSKFVRIDGLNATTEKLDTRLASAEKSIAEHGTRLNGLDKTVSDLRKETRQGLAEQAALSGLFQPYNVGRFNVTAAVGGYKSESAVAIGTGFRFTENFAAKAGVAVGTSSGSSAAYHVGVNYEW

SEQ ID NO: 72712 - protein, 355 aa, Neisseria meningitidis
MKHFQSKVLTAAILASFCSGALAASNSDETEVIDHTLEKLPQPPWLEPTTMPKKSTVSKSETPSTTLMEAAKLPQKKQPKKMSITTTLKVWVKKSWLNTTKALPTPESSRKTAKHWKPPRLSMTSVPMSLTTQQLSGKTKLLSPKRQIKPHWMQYPKRPQMKLLSLQKQTKPNWIKCPAKPQTRLLSLQKQTKPNWIKCPAKPQTRLLSLQKQTVPTCTLKLRCTPNKSLTTDLSKLVTESVITLLPMDWIHARLPKKPLPNTVRAWTAWIKQCQTCVKKPAKALQNKPRSPACSNLTTWVGSMRLQSAATNPNRQSPSVPASALPKTLPPKQAWQSALRPVLPQPTMSASITSG

SEQ ID NO: 72713 - protein, 317 aa, Neisseria meningitidis
MKHFQSKVLTAAILAALSGSAMADNPPLPLTKLPKPPWLESTTIPKTSTDSKSETPSTTLKMASLKEDQQQKTMLKPMTSAVWVKKSWLNTTKALPTPEPSRKTAKHWKPPRLSMTSVPMSKPTQQLSGKTKLLSLQKQTKPNWMKCPARPQTRLLSVKKQTVPTCTLKLRCTPNKSLTTDLSKLVTESVITLLPMDWRHAWPMPKNPLKTTVRAWLLPKNPLPNTVRATVWIEQCQTCAKKPAKALQNKPRSPACSNLTTWVGSMRLQSAATNPNRQSPSVPASALPKTLPPKQAWQSALRPVLPQPTMSASITSG

SEQ ID NO: 72714 - protein, 310 aa, Neisseria meningitidis
MKHFQSKVLTAAILAALSGSAMADNPPPFHRNCQSRPGWSLQQYPRHQRIQSRRHHLRHKWPARKTSNRRRCSRLRRSGSERSLGSTRPKPCRPDRNRRGKQRSIGENRRSCQHQCRCQSQHSSYQGKQSCYRYKSRQNRTGSVRQGNRKRDCYRKSKQCRRVHSGVHQTRVQQICQNWQNRSEHYCQWIGDTLGRCRKIRRPRYALGFCRKIHYRTRYAPERFGNSVRPAQRNPPRPCRTSRALRPVPTLQRGSVQCNGCSRRLQIRIGSRHRYRLPLYRKLCRQSRRGSRHFVRFFRSLPCRRQLRVV

SEQ ID NO: 72715 - protein, 364 aa, Neisseria meningitidis
MSMKHFPSKVLTTAILATFCSGALAATSDDDVKKAATVAIVAAYNNGQEINGFKAGETIYDIGEDGTITQKDATAADVEADDFKGLGLKKVVTNLTKTVNENKQNVDAKVKAAESEIEKLTTKLADTDAALADTDAALDETTNALNKLGENITTFAEETKTNIVKIDEKLEAVADTVDKHAEAFNDIADSLDETNTKADEAVKTANEAKQTAEETKQNVDAKVKAAETAAGKAEAAAGTANTAADKAEAVAAKVTDIKADIATNKADIAKNSARIDSLDKNVANLRKETRQGLAEQAALSGLFQPYNVGRFNVTAAVGGYKSESAVAIGTGFRFTENFAAKAGVAVGTSSGSSAAYHVGVNYEW

SEQ ID NO: 72716 - protein, 407 aa, Neisseria meningitidis
MSMKHFPSKVLTTAILATFCSGALAATNDDDVKKAATVAIAAAYNNGQEINGFKAGETIYDIDEDGTITKKDATAADVEADDFKGLGLKKVVTNLTKTVNENKQNVDAKVKAAESEIEKLTTKLADTDAALADTDAALDATTNALNKLGENITTFAEETKTNIVKIDEKLEAVADTVDKHAEAFNDIADSLDETNTKADEAVKTANEAKQTAEETKQNVDAKVKAAETAAGKAEAAAGTANTAADKAEAVAAKVTDIKADIATNKDNIAKKANSADVYTREESDSKFVRIDGLNATTEKLDTRLASAEKSITEHGTRLNGLDRTVSDLRKETRQGLAEQAALSGLFQPYNVGRFNVTAAVGGYKSESAVAIGTGFRFTENFAAKAGVAVGTSSGSSAAYHVGVNYEW

SEQ ID NO: 72717 - protein, 407 aa, Neisseria meningitidis
MSMQHFPSKVLTTAILATFCSGALAATNDDDVKKAATVAIAAAYNNGQEINGFKAGETIYDIDEDGTITKKDATAADVEADDFKGLGLKKVVTNLTKTVNENKQNVDAKVKAAESEIEKLTTKLADTDAALADTDAALDATTNALNKLGENITTFAEETKTNIVKIDEKLEAVADTVDKHAEAFNDIADSLDETNTKADEAVKTANEAKQTAEETKQNVDAKVKAAETAAGKAEAAAGTANTAADKAEAVAAKVTDIKADIATNKDNIAKKANSADVYTREESDSKFVRIDGLNATTEKLDTRLASAEKSIADHDTRLNGLDKTVSDLRKETRQGLAEQAALSGLFQPYNVGRFNVTAAVGGYKSESAVAIGTGFRFTENFAAKAGVAVGTSSGSSAAYHVGVNYEW

SEQ ID NO: 72718 - protein, 322 aa, Neisseria meningitidis
MSMKHFPSKVLTTAILATFCSGALAATNDDDVKKAATVAIAAAYNNGQEINGFKAGETIYDIDEDGTITKKDATAADVEADDFKGLGLKKVVTNLTKTVNENKQNVDAKVKAAESEIEKLTTKLADTDAALDATTNALNKLGENITTFAEETRACPQFNLAIIEQAKSIDLKLRANFSRVAILRNCFNRANAFSTKWRNLRLSKSGLGFLAFLRFGIIAFIPCSIALSLISCESYPLSAIKYWASCMTSIKSFATPSCTLPPVTLKSSGFPCESTHRCIFVVFPPRLCPIALSKPRRAPLACHRTLPSMNTHSLSISFRRSK

SEQ ID NO: 72719 - protein, 641 aa, Neisseria meningitidis
MSMKHFPSKVLTTAILATFCSGALAATNDDDVKKAATVAIAAAYNNGQEINGFKAGETIYDIDEDGTITKKDATAADVEADDFKGLGLKKVVTNLTKTVNENKQNVDAKVKAAESEIEKLTTKLADTDAALDATTNALNKLGENITTFAEETRACPQFNLAIIEQAKSIDLKLRANFSRVAILRNCFNRANAFSTKWRNLRLSKSGLGFLAFLRFGIIAFIPCSIALSLISCESYPLSAIKYWASCMTSIKSFATPSCTLPPVTLKSSGFPCESTHRCIFVVFPPRLCPIALSKPRRAPLACHRTLPSMNTHSLSISFRRSKKNSATSLFTIGSGYKRFSMTLAQVCLAMVHLFLASIVWLPSRYGRSSIDDSRALSWLFVIVPICCQLLRFSPLFVFAYISLEYRVKIGLFWAYSNGHALRQISKLMKNKPWLIPSTSMPKHSTISPIHWMKPTLRQTKPSKPPMKPNRRPKKPNKTSMPKKLQKLPLAQLILQPTRPKLSLQKLPTSKLISLRTKIILLKKQTVPTCTPEKSLTANLSELMVTLLPKNWTHAWLLPKNPLPNTVRATVWIEQCQTCVKKPAKALQNKPRSPVCSNLTTWVGSMRLQSAATNPNRQSPSVPASALPKTLPPKQAWQSALR

SEQ ID NO: 72720 - protein, 486 aa, Neisseria meningitidis
MSMKHFPSKVLTTAILATFCSGALAATNDDDVKKAATVAIAAAYNNGQEINGFKAGETIYDIDEDGTITKKDATAADVEADDFKGLGLKKVVTNLTKTVNENKQNVDAKVKAAESEIEKLTTKLADTDAALDATTNALNKLGENITTFAEETRACPQFNLAIIEQAKSIDLKLRANFSRVAILRNCFNRANAFSTKWRNLRLSKSGLGFLAFLRFGIIAFIPCSIALSLISCESYPLSAIKYWASCMTSIKSFATPSCTLPPVTLKSSGFPCESTHRCIFVVFPPRLCPIALSKPRRAPLACHRTLPSMNTHSLSISFRRSKKNSATSLFTIGSGYKRFSMTLAQVCLAMVHLFLASIVWLPSRYGRSSIDDSRALSWLFVIVPICCQLLRFSPLFVFAYISLEYRVKIGLFWAYSNGHALRQISKLMKNKPWLIPSTSMPKHSTISPIHWMKPTLRQTKPSKPPMKPNRRPKKPNKTSMPKKLQK

SEQ ID NO: 72721 - protein, 407 aa, Neisseria meningitidis
MSMKHFPSKVLTTAILATFCSGALAATNDDDVKKAATVAIAAAYNNGQEINGFKAGETIYDIDEDGTITKKDATAADVEADDFKGLGLKKVVTNLTKTVNENKQNVDAKVKAAESEIEKLTTKLADTDAALADTDAALDATTNALNKLGENITTFAEETKTNIVKIDEKLEAVADTVDKHAEAFNDIADSLDETNTKADEAVKTANEAKQTAEETKQNVDAKVKAAETAAGKAEAAAGTANTAADKAEAVAAKVTDIKADIATNKDNIAKKANSADVYTREESDSKFVRIDGLNATTEKLDTRLASAEKSIADHDTRLNGLDKTVSDLRKETRQGLAEQAALSGLFQPYNVGRFNVTAAVGGYKSESAVAIGTGFRFTENFAAKAGVAVGTSSGSSAAYHVGVNYEW

SEQ ID NO: 72722 - protein, 325 aa, Neisseria meningitidis
MSHETLSIQSTDRSHPCRPQRQRNGRQPPRRNCQSRPSLLQQYPRHQRIQSRRHHLRHKQDYPIKKQQKPMLKLTTLKVWVKKSWLNTTKALPTPKPSMKTAKHWNCEVVNEISADVKPTQQLSGNKAAIAKKADQTALDAVSEKVTANETAIATKADKTELDKVSGKVTANESAIGKKANSADVYTKAEVYTKQESDNRFVKIGDRIGNLNTTADGLDTRLKTAEKTITEHGTRLDGLDKTVSNLRKETRQGLAEQAALSGLFQPYNVGRFNVTAAVGGYKSESAVAIGTGFRFTENFAAKAGVAVGTSSGSSAAYHVGVNYEW

SEQ ID NO: 72723 - protein, 325 aa, Neisseria meningitidis
MSMKHFPSKVLTAAILAALSGSAMADNAPTADEIAKAALVNSYNNTQDINGFTVGDTIYDIKNDKITKKEATEADVEADDFKGLGLKEVVAQHDQSLADLTETVNENSEALVKTAAVVNDISADVKANTAAIGENKAAIATKADKTELDKVSGKVTENETAIGKKANSADVYTKAEVYTKQESDNRFVKISDGIGNLNTTANGLETRLAAAEQSVADHGTRLASAEKSITEHGTRLNGLDRTVSDLRKETRQGLAEQAALSGLFQPYNVGRFNVTAAVGGYKSESAVAIGTGFRFTENFAAKAGVAVGTSSGSSAAYHVGVNYEW

SEQ ID NO: 72724 - protein, 195 aa, Neisseria meningitidis
MSMKHFPSKVLTAAILAALSGSAMADNAPTADEIAKAALVNSYNNTQDINGFTVGDTIYDIKNDKITKKEATEADVEADDFKGLGLKEVVAQHDQSLADLTETVNENSEALVKTAAVVNDISADVKANTAAIGENKAAIAKKADQTALDAVSEKVTANETAIATKADKTELDKVSGKVTDNETAIGKKANSADVY

SEQ ID NO: 72725 - protein, 400 aa, Neisseria meningitidis
MSMKHFPSKVLTTAILATFCSGALAATNDDDVKKAATVAIAAAYNNGQEINGFKAGETIYDIDEDGTITKKDATAADVEADDFKGLGLKKVVTNLTKTVNENKQNVDAKVKAAESEIEKLTTKLADTDAALDATTNALNKLGENITTFAEETKTNIVKIDEKLEAVADTVDKHAEAFNDIADSLDETNTKADEAVKTANEAKQTAEETKQNVDAKVKAAETAAGKAEAAAGTANTAADKAEAVAAKVTDIKADIATNKDNIAKKANSADVYTREESDSKFVRIDGLNATTEKLDTRLASAEKSITEHGTRLNGLDRTVSDLRKETRQGLAEQAALSGLFQPYNVGRFNVTAAVGGYKSESAVAIGTGFRFTENFAAKAGVAVGTSSGSSAAYHVGVNYEW

SEQ ID NO: 72726 - protein, 393 aa, Neisseria meningitidis
MSMKHFPSKVLTTAILATFCSGALAATNDDDVKKAATVAIAAAYNNGQEINGFKAGETIYDIDEDGTITKKDATAADVEADDFKGLGLKKVVTNLTKTVNENKQNVDAKVKAAESEIEKLTTKLADTDAALDATTNALNKLGENITTFAEETKTNIVKIDEKLEAVADTVDKHAEAFNDIADSLDETNTKADEAVKTANEAKQTAEETKQNVDAKVKAAETAAGTANTAADKAEAVAAKVTDIKADIATNKDNIAKKANSADVYTREESDSKFVRIDGLNATTEKLDTRLASAEKSITEHGTRLNGLDRTVSDLRKETRQGLAEQAALSGLFQPYNVGRFNVTAAVGGYKSESAVAIGTGFRFTENFAAKAGVAVGTSSGSSAAYHVGVNYEW

SEQ ID NO: 72727 - protein, 249 aa, Neisseria meningitidis
MKHFPSKVLTTAILATFCSGALAATSDDDVKKAATVAIVAAYNNGQEINGFKAGETIYDIGEDGTITQKDATAADVEADDFKGLGLKKVVTNLTKTVNENKQNVDAKVKAAETAAGKAEAAAGTANTAADKAEAVAAKVTDIKADIATNKADIAKNSARIDSLDKNVANLRKETRQGLAEQAALSGLFQPYNVGRFNVTAAVGGYKSESAVAIGTGFRFTENFAAKAGVAVGTSSGSSAAYHVGVNYEW

SEQ ID NO: 72728 - protein, 398 aa, Neisseria meningitidis
MKHFQSKVLAAAILASFCSGALAATNDDDVKKAATVAIAAAYNNGQEINGFKAGETIYDIDEDGTITKKDATAADVEADDFKGLGLKKVVTNLTKTVNENKQNVDAKVKAAESEIEKLTTKLADTDAALDATTNALNKLGENITTFAEETKTNIVKIDEKLEAVADTVDKHAEAFNDIADSLDETNTKADEAVKTANEAKQTAEETKQNVDAKVKAAETAAGKAEAAAGTANTAADKAEAVAAKVTDIKADIATNKDNIAKKANSADVYTREESDSKFVRIDGLNATTEKLDTRLASAEKSITEHGTRLNGLDRTVSDLRKETRQGLAEQAALSGLFQPYNVGRFNVTAAVGGYKSESAVAIGTGFRFTENFAAKAGVAVGTSSGSSAAYHVGVNYEW

SEQ ID NO: 72729 - protein, 323 aa, Neisseria meningitidis
MKHFPSKVLTAAILAALSGSAMADNAPTADEIAKAALVNSYNNTQDINGFTVGDTIYDIKNDKITKKEATEADVEADDFKGLGLKEVVAQHDQSLADLTETVNENSEALVKTAAVVNDISADVKANTAAIGENKAAIATKADKTELDKVSGKVTENETAIGKKANSADVYTKAEVYTKQESDNRFVKISDGIGNLNTTANGLETRLAAAEQSVADHGTRLASAEKSITEHGTRLNGLDRTVSDLRKETRQGLAEQAALSGLFQPYNVGRFNVTAAVGGYKSESAVAIGTGFRFTENFAAKAGVAVGTSSGSSAAYHVGVNYEW

SEQ ID NO: 72730 - protein, 362 aa, Neisseria meningitidis
MKHFPSKVLTTAILATFCSGALAATSDDDVKKAATVAIVAAYNNGQEINGFKAGETIYDIGEDGTITQKDATAADVEADDFKGLGLKKVVTNLTKTVNENKQNVDAKVKAAESEIEKLTTKLADTDASLADTDAALDETTNALNKLGENITTFAEETKTNIVKIDEKLEAVADTVDKHAEAFNDIADSLDETNTKADEAVKTANEAKQTAEETKQNVDAKVKAAETAAGKAEAAAGTANTAADKAEAVAAKVTDIKADIATNKADIAKNSARIDSLDKNVANLRKETRQGLAEQAALSGLFQPYNVGRFNVTAAVGGYKSESAVAIGTGFRFTENFAAKAGVAVGTSSGSSAAYHVGVNYEW

SEQ ID NO: 72731 - protein, 398 aa, Neisseria meningitidis; identical to SEQ ID NO: 11476

SEQ ID NO: 72732 - protein, 391 aa, Neisseria meningitidis; identical to SEQ ID NO: 72704

SEQ ID NO: 72733 - protein, 398 aa, Neisseria meningitidis; identical to SEQ ID NO: 11476

SEQ ID NO: 72734 - protein, 398 aa, Neisseria meningitidis; identical to SEQ ID NO: 11476

SEQ ID NO: 72735 - protein, 391 aa, Neisseria meningitidis
MKHFPSKVLTTAILATFCSGALAAINDDDVKKAATVAIAAAYNNGQEINGFKAGETIYDIDEDGTITKKDATAADVEADDFKGLGLKKVVTNLTKTVNENKQNVDAKVKAAESEIEKLTTKLADTDAALDATTNALNKLGENITTFAEETKTNIVKIDEKLEAVADTVDKHAEAFNDIADSLDETNTKADEAVKTANEAKQTAEETKQNVDAKVKAAETAAGTANTAADKAEAVAAKVTDIKADIATNKDNIAKKANSADVYTREESDSKFVRIDGLNATTEKLDTRLASAEKSITEHGTRLNGLDRTVSDLRKETRQGLAEQAALSGLFQPYNVGRFNVTAAVGGYKSESAVAIGTGFRFTENFAAKAGVAVGTSSGSSAAYHVGVNYEW

SEQ ID NO: 72736 - protein, 362 aa, Neisseria meningitidis; identical to SEQ ID NO: 7577

SEQ ID NO: 72737 - protein, 391 aa, Neisseria meningitidis; identical to SEQ ID NO: 72704

SEQ ID NO: 72738 - protein, 292 aa, Neisseria meningitidis
MKHFPSKVLTTAILATFCSGALAATNDDDVKKAATVAIAAAYNNGQEINGFKAGETIYDIDEDGTITKKDATAADVEADDFKGLGLKKVVTNLTKTVNENKQNVDAKVKAAETAAGKAEAAAGTANTAADKAEAVAAKVTDIKADIATNKDNIAKKANSADVYTREESDSKFVRIDGLNATTEKLDTRLASAEKSITEHGTRLNGLDRTVSDLRKETRQGLAEQAALSGLFQPYNVGRFNVTAAVGGYKSESAVAIGTGFRFTENFAAKAGVAVGTSSGSSAAYHVGVNYEW

SEQ ID NO: 72739 - protein, 362 aa, Neisseria meningitidis; identical to SEQ ID NO: 7577

SEQ ID NO: 72740 - protein, 398 aa, Neisseria meningitidis; identical to SEQ ID NO: 11476

SEQ ID NO: 72741 - protein, 362 aa, Neisseria meningitidis
MKHFPSKVLTTAILATFCSGALAATSDDDVKKAATVAIVAAYNNGQEINGFKAGETIYDIGEDGTITQKDATAADVEADDFKGLGLKKVVTNLTKTVNENKQNVDAKVKAAESEIEKLTTKLADTDAALADTDAALDETTNALNKLGENITTFAEETKTNIVKIDEKLEAVADTVDKHAEAFNDIADSLDETNTKADEAVKTANEAKQTAEETKQNVDTKVKAAETAAGKAEAAAGTANTAADKAEAVAAKVTDIKADIATNKADIAKNSARIDSLDKNVANLRKETRQGLAEQAALSGLFQPYNVGRFNVTAAVGGYKSESAVAIGTGFRFTENFAAKAGVAVGTSSGSSAAYHVGVNYEW

SEQ ID NO: 72742 - protein, 658 aa, Neisseria meningitidis
MKHFPSKVLTTAILATFCSGALAATNDDDVKKAATVAIAAAYNNGQEINGFKAGETIYDIDEDGTITKKDATAADVEADDFKGLGLKKVVTNLTKTVNENKQNVDAKVKAAESEIEKLTTKLADTDAALDATTNALNKLGENITTFAEETRACPQFNLAIIEQAKSIDLKLRANFSRVAILRNCFNRANAFSTKWRNLRLSKSGLGFLAFLRFGIIAFIPCSIALSLISCESYPLSAIKYWASCMTSIKSFATPSCTLPPVTLKSSGFPCESTHRCIFVVFPPRLCPIALSKPRRAPLACHRTLPSNEYPFFVNFFSIKKKFCHKPFLDHRLKRLAVFHDPSSIGMSRHGAPVLSFHSMASITVRSFFHQPCAFMVVCNCSHMLSVIAVLAIVCVCLYFVGIGNRALLGLFKLGTRPKTNIVKIDEKLEAVADTVDKHAEAFNDIADSLDETNTKADEAVKTANEAKQTAEETKQNVDAKVKAAETAAGTANTAADKAEAVAAKVTDIKADIATNKDNIAKKANSADVYTREESDSKFVRIDGLNATTEKLDTRLASAEKSITEHGTRLNGLDRTVSDLRKETRQGLAEQAALSGLFQPYNVGRFNVTAAVGGYKSESAVAIGTGFRFTENFAAKAGVAVGTSSGSSAAYHVGVNYEW

SEQ ID NO: 72743 - protein, 391 aa, Neisseria meningitidis; identical to SEQ ID NO: 72704

SEQ ID NO: 72744 - protein, 362 aa, Neisseria meningitidis; identical to SEQ ID NO: 7577

SEQ ID NO: 72745 - protein, 391 aa, Neisseria meningitidis; identical to SEQ ID NO: 72704

SEQ ID NO: 72746 - protein, 398 aa, Neisseria meningitidis; identical to SEQ ID NO: 11476

SEQ ID NO: 72747 - protein, 405 aa, Neisseria meningitidis; identical to SEQ ID NO: 12893

SEQ ID NO: 72748 - protein, 285 aa, Neisseria meningitidis
MKHFPSKVLTTAILATFCSGALAATNDDDVKKAATVAIAAAYNNGQEINGFKAGETIYDIDEDGTITKKDATAADVEADDFKGLGLKKVVTNLTKTVNENKQNVDAKVKAAETAAGTANTAADKAEAVAAKVTDIKADIATNKDNIAKKANSADVYTREESDSKFVRIDGLNATTEKLDTRLASAEKSITEHGTRLNGLDRTVSDLRKETRQGLAEQAALSGLFQPYNVGRFNVTAAVGGYKSESAVAIGTGFRFTENFAAKAGVAVGTSSGSSAAYHVGVNYEW

SEQ ID NO: 72749 - protein, 398 aa, Neisseria meningitidis; identical to SEQ ID NO: 11476

SEQ ID NO: 72750 - protein, 398 aa, Neisseria meningitidis; identical to SEQ ID NO: 11476

SEQ ID NO: 72751 - protein, 398 aa, Neisseria meningitidis; identical to SEQ ID NO: 11476

SEQ ID NO: 72752 - protein, 398 aa, Neisseria meningitidis; identical to SEQ ID NO: 11476

SEQ ID NO: 72753 - protein, 398 aa, Neisseria meningitidis; identical to SEQ ID NO: 11476

SEQ ID NO: 72754 - protein, 391 aa, Neisseria meningitidis; identical to SEQ ID NO: 72704

SEQ ID NO: 72755 - protein, 405 aa, Neisseria meningitidis
MKHFPSKVLTTAILATFCSGALAATNDDDVKKAATVAIAAAYNNGQEINGFKAGETIYDIDEDGTITKKDATAADVEADDFKGLGLKKVVTNLTKTVNENKQNVDAKVKAAESEIEKLTTKLADTDAALADTDAALDATTNALNKLGENITTFAEETKTNIVKIDEKLEAVADTVDKHAEAFNDIADSLDETNTKADEAVKTANEAKQTAEETKQNVDAKVKAAETAAGKAEAAAGTANTAADKAEAVAAKVTDIKADIATNKDNIAKKANSADVYTREESDSKFVRIDGLNATTEKLDTRLASAEKSIADHDTRLNGLDKTVSDLRKETRQGLAEQAALSGLFQPYNVGRFNVTATVGGYKSESAVAIGTGFRFTENFAAKAGVAVGTSSGSSAAYHVGVNYEW

SEQ ID NO: 72756 - protein, 398 aa, Neisseria meningitidis; identical to SEQ ID NO: 11476

SEQ ID NO: 72757 - protein, 398 aa, Neisseria meningitidis; identical to SEQ ID NO: 11476

SEQ ID NO: 72758 - protein, 391 aa, Neisseria meningitidis; identical to SEQ ID NO: 72704

SEQ ID NO: 72759 - protein, 323 aa, Neisseria meningitidis; identical to SEQ ID NO: 72729

SEQ ID NO: 72760 - protein, 342 aa, Neisseria meningitidis
MKHFPSKVLTTAILATFCSGALAATSDDDVKKAATVAIVAAYNNGQEINGFKAGETIYDIGEDGTITQKDATAADVEADDFKGLGLKKVVTNLTKTVNENKQNVDAKVKAAESEIEKLTTKLADTDAALADTDAALDETTNALNKLGENITTFAEETKTNIVKIDEKLEAVADTVDKHAEAFNDIADSLDETNTKADEAVKTANEAKQTAEETKQNVDAKVKAAETAAGKAEAAAGTANTAADKAEAVAAKVTDIKADIATNKADIAKNSARIDSLDKNVANLRKETRQGLAEQAALSGLFQPYNMGRFNVTAAVGGYKSESAVGTSSGSSAAYHVGVNYEW

SEQ ID NO: 72761 - protein, 362 aa, Neisseria meningitidis; identical to SEQ ID NO: 7577

SEQ ID NO: 72762 - protein, 362 aa, Neisseria meningitidis; identical to SEQ ID NO: 7577

SEQ ID NO: 72763 - protein, 362 aa, Neisseria meningitidis; identical to SEQ ID NO: 7577

SEQ ID NO: 72764 - protein, 362 aa, Neisseria meningitidis; identical to SEQ ID NO: 7577

SEQ ID NO: 72765 - protein, 362 aa, Neisseria meningitidis; identical to SEQ ID NO: 7577

SEQ ID NO: 72766 - protein, 391 aa, Neisseria meningitidis; identical to SEQ ID NO: 72704

SEQ ID NO: 72767 - protein, 362 aa, Neisseria meningitidis; identical to SEQ ID NO: 7577

SEQ ID NO: 72768 - protein, 362 aa, Neisseria meningitidis; identical to SEQ ID NO: 7577

SEQ ID NO: 72769 - protein, 362 aa, Neisseria meningitidis; identical to SEQ ID NO: 7577

SEQ ID NO: 72770 - protein, 362 aa, Neisseria meningitidis; identical to SEQ ID NO: 7577

SEQ ID NO: 72771 - protein, 362 aa, Neisseria meningitidis; identical to SEQ ID NO: 7577

SEQ ID NO: 72772 - protein, 362 aa, Neisseria meningitidis; identical to SEQ ID NO: 7577

SEQ ID NO: 72773 - protein, 362 aa, Neisseria meningitidis; identical to SEQ ID NO: 7577

SEQ ID NO: 72774 - protein, 362 aa, Neisseria meningitidis; identical to SEQ ID NO: 7577

SEQ ID NO: 72775 - protein, 362 aa, Neisseria meningitidis
MKHFPSKVLTTAILATFCSGALAATSDDDVKKAATVAIVAAYNNGQEINGFKAGETIYDIGEDGTITQKDATAADVEADDFKGLGLKKVVTNLTKTVNENKQNVDAKVKAAESEIEKLTTKLADTDAALADTDAALDETTNALNKLGENITTFAEETKTNIVKIDEKLEAVADTVDKHAEAFNDIADSLDETNTKADEAVKTANEAKQTAEETKQNVDAKVKAAETAAGKAEAAAGTANTAADKAEAVAAKVTDIKADIATNKADIAKNSARIDSLDKNVANLRKETRQGLAEQAALSGLFQPYNVGRFNVTAAVGGYKSESAVTIGTGFRFTENFAAKAGVAVGTSSGSSAAYHVGVNYEW

SEQ ID NO: 72776 - protein, 391 aa, Neisseria meningitidis; identical to SEQ ID NO: 72704

SEQ ID NO: 72777 - protein, 202 aa, Neisseria meningitidis; identical to SEQ ID NO: 597

SEQ ID NO: 72778 - protein, 202 aa, Neisseria meningitidis
MKPKPHTVRTLIAAIFSLALSGCVSAVIGSAAVGAKSAVDRRTTGAQTDDNVMALRIETTARSYLRQNNQTKGYTPQISVVGYNRHLLLLGQVATEGEKQFVGQIARSEQAAEGVYNYITVASLPRTAGDIAGDTWNTSKVRATLLGISPATQARVKIVTYGNVTYVMGILTPEEQAQITQKVSTTVGVQKVITPLPNYVQR

SEQ ID NO: 72779 - protein, 202 aa, Neisseria meningitidis
MKPKPHTRPPLIAAIFSLALSGCVSAVIGSAAVGAKSAVDRRTTGAQTDDNVMALRIETTARSYLRQNNQTKGYTPQISVVGYNRHLLLLGQVATEGEKQFVGQIARSEQAAEGVYNYITVASLPRTAGDIAGDTWNTSKVRATLLGISPATQARVKIVTYGNVTYVMGILTPEEQAQITQKVSTTVGVQKVITLYQNYVQR

SEQ ID NO: 72780 - protein, 202 aa, Neisseria meningitidis
MKPKPHTVRTLIAAIFSLALGGCVSAVVGGAAVGAKSAVDRRTTGAQTDDNVMALRIETTARSYLRQNNQTKGYTPQISVVGYNRHLLLLGQVATEGEKQFVGQIARSEQAAEGVYNYITVASLPRTAGDIAGDTWNTSKVRATLLGISPATQARVKIVTYGNVTYVMGILTPEEQAQITQKVSTTVGVQKVITLYQNYVQR

SEQ ID NO: 72781 - protein, 201 aa, Neisseria meningitidis
MKPKPHTVRTLIAAIFSLALSGCVSAVIGSAAVGAKSAVDRRTTGAQTDDNVMALRIETTARSYLRQNNQTKGYTPQISVVGYNRHLLLLGQVATEGEKQFVGQIARSEQAAEGVYNYITVASLPRTAGDIAGDTWNTSKVRATLLGISPATQARVKIVTYGNVTYVMGILTPEEQAQITQKVSTTVGVQKVITLYQNVQR

SEQ ID NO: 72782 - protein, 202 aa, Neisseria meningitidis
MKPKPHTVRTLIAAIFSLALSGCVSAVIGSAAVGAKSAVDRRTTGAQTDDNVMALRIETTARSYLRQNNQTKGYTPQISVVGYNRHLLLLGQVATEGEKQFVGQIARSEQAAEGVYNYITVASLPRTVGDIAGDTWNTSKVRATLLGISPATQARVKIVTYGNVTYVMGILTPEEQAQITQKVSTTVGVQKVITLYQNYVQR

SEQ ID NO: 72783 - protein, 202 aa, Neisseria meningitidis
MKPKPHTVRTLIAAIFSLALSGCVSAVIGSAAVGAKSAVDRRTTGAQTDDNVMALRIETTARSYLRQNNQTKGYTPQISVVGYNRHLLLLGQVATEGEKQFVGQIARSEQAAEGVYNYITVASLPRTAGDIAGDTWNTSKVRATLLGISPATQARVKIVTYGNVTYVMGILTPEEQAQITQKVSTSVGVQKVITLYQNYVQR

SEQ ID NO: 72784 - protein, 202 aa, Neisseria meningitidis
MKPKPHTVRTLIAAIFSLALSGCVSAVIGSAAVGAKSAVDRRTTGAQTDDNVMALRIETTARSYLRQNNQTKGYTPQISVVGYNRHLLLLGQVATEGEKQFVGQIARSEQAAEGVYNYITVASLPRTAGDIAGDTWNTSKVRATLLGISPATQARVKIVTYGNVTYVMGILTPEEQAQITQKVSTTVGVQKVITLYQKYVQR

SEQ ID NO: 72785 - protein, 202 aa, Neisseria meningitidis
MKPKPHTVRTLIAAIFSLALSGCVSAVIGSAAVGAKSAVDRRTTGAQTDDNVMALRIETTARSYLHQNNQTKGYTPQISVVGYNRHLLLLGQVATEGEKQFVGQIARSEQAAEGVYNYITVASLPRTAGDIAGDTWNTSKVRATLLGISPATQARVKIVTYGNVTYVMGILTPEEQAQITQKVSTTVGVQKVITLYQNYVQR

SEQ ID NO: 72786 - protein, 202 aa, Neisseria meningitidis
MKPKPHTVRTLIAAIFSLALSGCVSAVIGSAAVGAKSAVDRRTTGAQTDDNVMALRIETTARSYLRQNNQTKGYTPQISVVGYNRHLLLLGQVATEGEKQFVGQIARSEQAAEGVYNYITVASLPRTAGDIAGDTWNTSKVRATLLGISPATQARVKIVTYGNVTYVMGILTPEEQAQITQKVSTTVGVQKFITLYQNYVQR

SEQ ID NO: 72787 - protein, 202 aa, Neisseria meningitidis
MKPKPHTVRTLIAAVLSLALGGCFSAVVGGAAVGAKSVIDRRTTGAQTDDNVMALRIETTARSYLRQNNQTKGYTPQISVVGYNRHLLLLGQVATEGEKQFVGQIARSEQAAEGVYNYITVASLPRTAGDIAGDTWNTSKVRATLLGISPATQARVKIITYGNVTYVMGILTPEEQAQITQKVSTTVGVQKVITLYQNYVQR

SEQ ID NO: 72788 - protein, 202 aa, Neisseria meningitidis
MKPKPHTVRTLTAAVLSLALGGCVSAVVGGAAVGAKSAVDRRTTGAQTDDNVMALRIETTARSYLRQNNQTKGYTPQISVVGYNRHLLLLGQVATEGEKQFVGQIARSEQAAEGVYNYITVASLPRTAGDIAGDTWNTSKVRATLLGISPATQARVKIVTYGNVTYVMGILTPEEQAQITQKVSTTVGVQKVITLYQNYVQR

SEQ ID NO: 72789 - protein, 202 aa, Neisseria meningitidis; identical to SEQ ID NO: 4004

SEQ ID NO: 72790 - protein, 202 aa, Neisseria meningitidis
MKLKLHTVRILTAAIFSLALSGCVSAVIGGAAVGAKSAIDRRTTGAQTDDNVMALRIETTARSYLRQNNQTKGYTPQISVVGYNRHLLLLGQVATEGEKQFVGQIARSEQAAEGVYNYITVASQPRSLGDITNDTWNTSKVRATLLGISPTTQARVKIVTYGNVTYVMGILTPEEQAQITQKVSTTVGVQKVITLYQNYVQR

SEQ ID NO: 72791 - protein, 191 aa, Neisseria meningitidis
MKLKLHTVRILTAAIFSLALSGCVSAVIGGAAVGAKSAIDRRTTGAQTDDNVMALRIETTARSYLRQNNQTKGYTPQISVVGYNRHLLLLGQVATEGEKQFVGQIARSEQAAEGVYNYITVASQPRSLGDITNDTWNTSKVRATLLGISPTTQARVKIVTYGNVTYVMGILTPEEQAQITQKVSTTVGVQK

SEQ ID NO: 72792 - protein, 202 aa, Neisseria meningitidis
MKLKLHTVRILTAAIFSLALSGCVSAVIGGAAVGAKSAVDRRTTGAQTDDNVMALRIETTARSYLRQNNQTKGYTPQISVVGYNRHLLLLGQVATEGEKQFVGQIARSEQAAEGVYNYITVASQPRSLGDITNDTWNTSKVRATLLGISPTTQARVKIVTYGNVTYVMGILTPEEQAQITQKVSTTVGVQKVITLYQNYVQR

SEQ ID NO: 72793 - protein, 492 aa, Neisseria meningitidis
MFKRSVIAMACIFALSACGGGGGGSPDVKSADTLSKPAAPVVSEKETEAKEDAPQAGSQGQGAPSAQGGQDMAAVSEENTGNGGAAATDKPKNEDEGAQNDMPQNAADTDSLTPNHTPASNMPAGNMENQAPDAGESEQPANQPDMANTADGMQGDDPSAGGENAGNTAAQGTNQAENNQTAGSQNPASSTNPSATNSGGDFGRTNVGNSVVIDGPSQNITLTHCKGDSCSGNNFLDEEVQLKSEFEKLSDADKISNYKKDGKNDGKNDKFVGLVADSVQMKGINQYIIFYKPKPTSFARFRRSARSRRSLPAEMPLIPVNQADTLIVDGEAVSLTGHSGNIFAPEGNYRYLTYGAEKLSGGSYALSVQGEPAKGEMLAGTAVYNGEVLHFHTENGRPYPSRGRFAAKVDFGSKSVDGIIDSGDDLHMGTQKFKAAIDGNGFKGTWTENGSGDVSGRFYGPAGEEVAGKYSYRPTDAEKGGFGVFAGKKEQD

SEQ ID NO: 72794 - protein, 492 aa, Neisseria meningitidis; identical to SEQ ID NO: 19231

SEQ ID NO: 72795 - protein, 488 aa, Neisseria meningitidis; identical to SEQ ID NO: 16700

SEQ ID NO: 72796 - protein, 488 aa, Neisseria meningitidis
MFKRSVIAMACIFALSACGGGGGGSPDVKSADTLSKPAAPVVSEKETEAKEDAPQAGSQGQGAPSAQGSQDMAAVSEENTGNGGAVTADNPKNEDEVAQNDMPQNAAGTDSSTPNHTPDPNMLAGNMENQATDAGESSQPANQPDMANAADGMQGDDPSAGGQNAGNTAAQGANQAGNNQAAGSSDPIPASNPAPANGGSNFGRVDLANGVLIDGPSQNITLTHCKGDSCSGNNFLDEEVQLKSEFEKLSDADKISNYKKDGKNDKFVGLVADSVQMKGINQYIIFYKPKPTSSARVRRSARSRRSLPAEMPLIPVNQADTLIVDGEVVSLTGHSGNIFAPEGNYRYLTYGAEKLSGGSYALRVQGEPAKGEMLAGTAVYNGEVLHFHTENGRSYPTRGRFAAKVDFGSKSVDGIIDSGDDLHMGTQKFKAVIDGNGFKGNWTENGGGDVSGRFYGPAGEEVAGKYSYRPTDAEKGGFGVFAGKKEQD

SEQ ID NO: 72797 - protein, 481 aa, Neisseria meningitidis
MFKRSVIAMACIFALSACGGGGGGSPDVKSADTLSKPAAPVVSEKETEAKEDAPQAGSQGQGAPSAQGGQDMAAVSEENTGNGGAATADNPKNEDEAQNDMPQNTAGTDSLTPNHTPASNMPAGNMENQAPDAGESAQPENKPDMANAADGIQGDDPSADGENAGNTAAQGTNQAENNQTAGSQNPASSTNPNATNGGGDFGRTNVGNSVVIDGPSQNITLTHCKGDPCNGDNLLDEEAPSKSEFEKLNESERIEKYKKDGKDKFVGLVATTVKMEGINKYIIFYTDKPPTRSARSRRSLPAEMPLIPVNQADTLIVDGEAVSLTGHSGNIFAPEGNYRYLTYGAEKLSGGSYALSVQGEPAKGEMLAGTAVYNGEVLHFHTENGRPYPTRGRFAAKVDFGSKSVDGIIDSGDDLHMGTQKFKAAIDGNGFKGTWTENGGGDVSGRFYGPVGEEVAGKYSYRPTDAEKGGFGVFAGKKEQD

SEQ ID NO: 72798 - protein, 426 aa, Neisseria meningitidis
MFKRSVIAMACIVALSACGGGGGGSPDVKSADTPSKPAAPVVAEKETEVKEDAPQAGSQGQGAPSTQGSQDMAAVSAENTGNGGAATTDKPKNEDEGPQNDMPQNAGNTAAQGTNQAENNQVGGSQNPAPSSNPNATNGGNFGRVDLANGVLIDGPSQNITLTHCKSDSCNGDNLLSEEAPSKSEFEQLSDEDKIKKYKKDGEKFTGLVADRLQMKGTNQYIIFYKPKTTSSARFRRSARSRRSLPAEMPLIPVNQADTLIVDGEAVSLTGHSGNIFAPEGNYRYLTYGAEKLSGGSYALSVQGEPAKGEMLAGTAVYNGEVLHFHTENGRSYPTKGRFAAKVDFGSKSVDGIIDSGDDLHMGKQKFKAAIDGNGFKGTWTENGGGDVSGRFYGPAGEEVAGKYSYRPTDAEKGGFGVFAGKKEQD

SEQ ID NO: 72799 - protein, 426 aa, Neisseria meningitidis
MFERSVIAMACIFALSACGGGGGGSPDVKSADTPSKPAAPVVAEKETEVKEDAPQAGSQGQGAPSTQGSQDMAAVSAENTGNGGAATTDKPKNEDEGPQNDMPQNAGNTAAQGTNQAENNQVGGSQNPAPSSNPNATNGGNFGRVDLANGVLIDGPSQNITLTHCKSDSCNGDNLLSEEAPSKSEFEQLSDEDKIKKYKKDGEKFTGLVADRLQMKGTNQYIIFYKPKTTSSARFRRSARSRRSLPAEMPLIPVNQADTLIVDGEAVSLTGHSGNIFAPEGNYRYLTYGAEKLSGGSYALSVQGEPAKGEMLAGTAVYNGEVLHFHTENGRSYPTKGRFAAKVDFGSKSVDGIIDSGDDLHMGKQKFKAAIDGNGFKGTWTENSGGDVSGKFYGPAGEEVAGKYSYRPTDAEKGGFGVFAGKKEQD

SEQ ID NO: 72800 - protein, 426 aa, Neisseria meningitidis
MFERSVIAMACIFALSACGGGGGGSPDVKSADTPSKPAAPVVAEKETEVKEDAPQAGSQGQGAPSTQGSQDMAAVSAENTGNGGAATTDKPKNEDEGPQNDMPQNAGNTAAQGTNQAENNQVGGSQNPAPSSNPNATNGGNFGRVDLANGVLIDGPSQNITLTHCKSDSCNGDNLLSEEAPSKSEFEQLSDEDKIKKYKKDGEKFTGLVADRLQMKGTNQYIIFYKPKTTSSARFRRSARSRRSLPAEMPLIPVNQADTLIVDGEAVSLTGHSGNIFAPEGNYRYLTYGAEKLSGGSYALSVQGEPAKGEMLAGTAVYNGEVLHFHTENGRSYPTKGRFAAKVDFGSKSVDGIIDSGDDLHMGKQKFKAAIDGNGFKGTWTENGGGDVSGRFYGPAGEEVAGKYSYRPTDAEKGGFGVFAGKKEQD

SEQ ID NO: 72801 - protein, 426 aa, Neisseria meningitidis
MFKRSVIAMACIVALSACGGGGGGSPDVKSADTPSKPAAPVVAEKETEVKEDAPQAGSQGQGAPSTQGSQDMAAVSAENTGNGGAATTDKPKNEDEGPQNDMPQNAGNTAAQGTNQAENNQVGGSQNPAPSSNPNATNGGNFGRVDLANGVLIDGPSQNITLTHCKSDSCNGDNLLSEEAPSKSEFEQLSDEDKIKKYKKDGEKFTGLVADRLQMKGTNQYIIFYKPKTTSSARFRRSARSRRSLPAEMPLIPVNQADTLIVDGEAVSLTGHSGNIFAPEGNYRYLTYGAEKLSGGSYALSVQGKPAKGEMLAGTAVYNGEVLHFHTENGRSYPTRGRFAAKVDFGSKSVDGIIDSGDDLHMGTQKFKAAIDGNGFKGNWTENGGGDVSGRFYGPAGEEVAGKYSYRPTDAEKGGFGVFAGKKEQD

SEQ ID NO: 72802 - protein, 425 aa, Neisseria meningitidis
MFKRSVIAMACIFALSACGGGGGGSPDVKSADTPSKPAAPVVAEKETDAKEDAPQAGSQGQGAPSAQGGQDMAAVSAENTGNGGAETADNPENKDEGTQNDMPQNAAESANQTGNNQSAGSSDSAPASNPAPANGGGDFGRTNVGNSVVIDGPSQNITLTHCKGDSCDGDNLLDEEAPSKSEFDNLSESERMEKYKKDGKSDKFTGFVADKLQMKGTNQYIIFYKPKTTSSARFRRSARSRRSLPAEMPLIPVNQADTLIVDGEAVSLTGHSGNIFAPEGNYRYLTYGAEKLSGGSYALRVQGEPAKGEMLAGTAVYNGEVLHFHTENGRPYPSRGRFAAKVDFGSKSVDGIIDSGDDLHMGTQKFKAAIDGNGFKGTWTENGGGDVSGRFYGPAGEEVAGKYSYRPTDAEKGGFGVFAGKKEQD

SEQ ID NO: 72803 - protein, 425 aa, Neisseria meningitidis
MFKRSVIAMACIFALSACGGGGGGSPDVKSADTPSKPAAPVVAEKETDAKEDAPQAGSQGQGAPSAQGGQDMAAVSAENTGNGGAETADNPENKDEGTQNDMPQNAAESANQTGNNQSAGSSDSAPASNPAPANGGGDFGRTNVGNSVVIDGPSQNITLTHCKGDSCDGDNLLDEEAPSKSEFDNLSESERMEKYKKDGKSDKFTGFVADKLQMKGTNQYIIFYKPKTTSSARFRRSARSRRSLPAEMPLIPVNQADTLIVDGEAVSLTGHSGNIFAPEGNYRYLTYGAEKLPGGSYALRVQGEPAKGEMLAGTAVYNGEVLHFHTENGRPYPTRGRFAAKVDFGSKSVDGIIDSGDDLHMGTQKFKAAIDGNGFKGTWTENGGGDVSGRFYGPAGEEVAGKYSYRPTDAEKGGFGVFAGKKEQD

SEQ ID NO: 72804 - protein, 496 aa, Neisseria meningitidis
MFKRSVIAMACIVALSACGGGGGGSPDVKSADTLSKPAAPVVTEDVGEEVLPKEKKDEEAVSGAPQADTQDATAGKGGQDMAAVSAENTGNGGAATTDNPENKDEGPQNDMPQNAADTDSSTPNHTPAPNMPTRDMGNQAPDSGESAQPANQPDMANAADGIQGDDPSVGENAGNTADQAENQAENNQAAGSQNPASSTNPNATNGGGDFGRTNVGNSVVIDGPSQNITLTHCKGDSCDGDNLLDEEAPSKSEFDNLSESERMEKYKKDGKSDKFTGFVADKLQMKGTNQYIIFYKPKTTSSARFRRSARLRRSLPAEMPLIPVNQADTLIVDGEAVSLTGHSGNIFAPEGNYRYLTYGAEKLSGGSYALSVQGEPAKGEMLAGTAVYNGEVLHFHTENGRPYPSRGRFAAKVDFGSKSVDGIIDSGDDLHMGTQKFKAAIDGNGFKGTWTENGSGDVSGKFYGPAGEEVAGKYSYRPTDAEKGGFGVFAGKKEQD

SEQ ID NO: 72805 - protein, 419 aa, Neisseria meningitidis
MFKRSVIAMACIVALSACGGGGGGSPDVKSADTPSKPTAPVVAEKETEAKEDAPQAGSQGQGAPSTQGSQDMAAVSAENTGNGGAATTDNPKNEDEGSQNDMPQNAAESANQTGNNQPAGSQNPAPSTNPNATNGGGDFGRTNVGNSVVIDGPSQNITLTHCKGDSCTGDNLLSEEAPSRSEFESLNDSGRIDKYKKDGQDKFTNLVATKVEKKGLNKYIIFYTDKPPTRSARSRRSLPTEMPLIPVNQADTLIIDGEAVSLTGHFGNIFAPEGNYRYLTYGAEKLPGGSYALRVQGEPAKGEMLAGTAVYNGEVLHFHTENGRPSPFRGRFAAKVDFGSKSVDGIIDSGDDLHMGTQKFKAAIDGNGFKGTWTENGSGDVSGKFYGPAGEEVAGKYSYRPTDAEKGGFGVFAGKKEQD

SEQ ID NO: 72806 - protein, 422 aa, Neisseria meningitidis
MFKRSVIAMACIVALSACGGGGGGSPDVKSADTPSKPAAPVVAEKETEVKEDAPQAGSQGQDVPSKQGSQDMAAVSAENTGNGGSATTDKPKNEDEGAQNDMPQNAAESANQTGNNQPAGSQNPAPSTNPNATNGGGDFGRTNVANGVLIDGPSQNITLTHCKGDSCDNGNLLDEEAPSKSEFESLNDSGRIDKYKKDGQDKFTNLVATKVEKKGLNKYVIFYTDTPPTRSARSRRLRRSLPAEMPLIPVNQADTLIVDGEAVSLTGHSGNIFAPEGNYRYLTYGAEKLSGGSYALSVQGKPAKGEMLAGTAVYNGEVLHFHTENGRSYPTRGRFAAKVDFGSKSVDGIIDSGDDLHMGTQKFKAVIDGNGFKGNWTENGGGDVSGRFYGPAGEEVAGKYSYRPTDAEKGGFGVFAGKKEQD

SEQ ID NO: 72807 - protein, 423 aa, Neisseria meningitidis
MFKRSVIAMACIVALSACGGGGGGSPDVKSADTPSKPAAPVVAEKETEAKEDAPQAGSQGQGAPSTQGSQDMAAVSAENTGNGGAATTDKPKNEDEGAQNDMPQNAAESANQAEKNQVGGSQNPASSTNPNATNGGNFGRVDLANGIKLDSGSENVTLTHCKDKVCDRDFLDEEAPSKSEFESLDDSGRINKYKKDGKSDKFTNLVATEVQANGVNKYVIIYKDKSASSAQFRRSARSRRSLPAEMPLIPVNQADTLIVDGEAVSLTGHSGNIFAPEGNYRYLTYGAEKLSGGSYALSVQGEPAKGEMLAGTAVYSGEVLHFHTENGRPYPSRGRFAAKVDFGSKSVDGIIDSGDDLHMGTQKFKAAIDGNGFKGTWTENGSGDVSGKFYGPAGEEVAGKYSYRPTDAEKGGFGVFAGKKEQD

SEQ ID NO: 72808 - protein, 486 aa, Neisseria meningitidis
MFKRSVIAMACIFALSACGGGGGGSPDVKSADTLSKPAAPVVAEKETDAKEDAPQAGSQGQGAPSAQGSQDMAAVSAENTGNGGAATTDKPKNEDEGAQDDMPQKAAGTDSSTPNHTPDPNMLAGNMENQATDAGESSQPANQPDMANAADGMQGDDPSAGGQNAGNTAAQGANQAGNNQAAGSSDSTPASNPATTNSGGDFGRTNVANGIKLDGPSQNITLTHCKDKVCGSDFLDEEAPPKSEFESLDDSGRINKYKKDGQDKFTNLVATEVKANGTNKYVIIYKDKSTSSARVRRSARSRRSLPAEMPLIPINQADTLIVDGEAVSLTGHSGNIFAPEGNYRYLTYGAEKLSGGSYALSVQGKPAKGEMLAGTAVYNGEVLHFHTENGRSYPTRGRFAAKVDFGSKSVDGIIDSGDGLHMGTQKFKAAIDGNGFKGTWTENGGGDVSGRFYGPAGEEVAGKYSYRPTDAEKGGFGVFAGKKEQD

SEQ ID NO: 72809 - protein, 425 aa, Neisseria meningitidis
MFERSVIAMACIFALSACGGGGGGSPDVKSADTLSKPAAPVVAEKETEVKEDAPQAGSQGQGAPSTQGSQDMAAVSAENTGNGGAATTDKPKNEDEGPQNDMPQNSAESANQTGNNQPADSSDSAPASNPAPANGGSNFGRVDLANGVLIDGPSQNITLTHCKGDSCNGDNLLDEEAPSKSEFENLNESERIEKYKKDGKSDKFTNLVATAVQANGTNKYVIIYKDKSTSSARVRRSARSRRSLPAEMPLIPVNQADTLIVDGEAVSLTGHSGNIFAPEGNYRYLTYGAEKLSGGSYALSVQGEPAKGEMLAGTAVYNGEVLHFHTENGRSYPTRGRFAAKVDFGSKSVDGIIDSGDDLHMGTQKFKAAIDGNGFKGTWTENGGGDVSGRFYGPAGEEVAGKYSYRPTDAEKGGFGVFAGKKEQD

SEQ ID NO: 72810 - protein, 425 aa, Neisseria meningitidis; identical to SEQ ID NO: 27660

SEQ ID NO: 72811 - protein, 425 aa, Neisseria meningitidis
MFERSVIAMACIFALSACGGGGGGSPDVKSADTLSKPAAPVVAEKETEVKEDAPQAGSQGQGAPSTQGSQDMAAVSAENTGNGGAATTDKPKNEDEGPQNDMLQNSAESANQTGNNQPADSSDSAPASNPAPANGGSNFGRVDLANGVLIDGPSQNITLTHCKGDSCNGDNLLDEEAPSKSEFENLNESERIEKYKKDGKSDKFTNLVATEVKANGTNKYVIIYKDKSTSSARVRRSARSRRSLPAEMPLIPVNQADTLIVDGEAVILTGHSGNIFAPEGNYRYLTYGAEKLSGGSYALSVQGEPAKGEMLAGTAVYNGEVLHFHTENGRSYPTKGRFAAKVDFGSKSVDGIIDSGDDLHMGTQKFKAVIDGNGFKGTWTENGGGDVSGRFYGPAGEEVAGKYSHRPTDAEKGGFGVFAGKKEQD

SEQ ID NO: 72812 - protein, 427 aa, Neisseria meningitidis; identical to SEQ ID NO: 2465

SEQ ID NO: 72813 - protein, 427 aa, Neisseria meningitidis; identical to SEQ ID NO: 29453

SEQ ID NO: 72814 - protein, 427 aa, Neisseria meningitidis
MFERSVIAMACIFALSACGGGGGGSPDVKSADTLSKPAAPVVAEKETEVKEDAPQAGSQGQGAPSTQGSQDMAAVSAENTGNGGAATTDKPKNEDEGPQNDMPQNSAESANQTGNNQPADSSDSAPASNPAPANGGSNFGRVDLANGVLIDGPSQNITLTHCKGDSCNGDNLLDEEAPSKSEFENLNESERIEKYKKDGKSDKFTNLVATAVQANGTNKYVIIYKDKSASSSSARFRRSARSRRSLPAEMPLIPVNQADTLIVDGEAVSLTGHSGNIFAPEGNYRYLTYGAEKLPGGSYALRVQGEPSKGEMLAGTAVYNGEVLHFHTENGRPSPSRGRFAAKVDFGSKSVDGIIDSGDGLHMGTQKFKAAIDGNGFKGTWTENGGGDVSGKFYGPAGEEVAGKYSYRPTDAEKGGFGVFAGKKEQD

SEQ ID NO: 72815 - protein, 493 aa, Neisseria meningitidis
MFKRSVIAMACIVALSACGGGGGGSPDVKSADTLSKPAAPVVAEDAGEEVLPKEKKDEEAVGGAPQADTQDETAGENSQDMAVVSAENTGNGGAATTDKPKNEDEGAQNDMPQNAADTDSLTPNHTTAPNMPTGDMGNQAPDSGESAQPANQPDMANAADGMQGDDPSAGGENAGNTAAQGTNQAENNQAAGSSDSTPASNPAPTNGGGDFGRTNVANGVLIDGPSQNITLTHCKGDFCSGDNLLDEEAPSKSEFEKLSDADKINNYKKDGKNNNKFVGLVADRVKKDGTNKYIIFYTDNPPHSFCTVETVEEVASCRDAANPRQSGGYADCRWGGGQPDWAFRQYLRARRKLPVSDLRGGKIARRIVCPSCSRRTGKRRNACGRGRVQRRSTAFPYGKRPSVPDGQVCRKSRFRQQICGRHYRQRRFAYGYAKIQSRHRWKRLGDLDGKWQRGCFRKVLRPGRRGSGGKIQLSPDRCGKGRIRRVCRQKRAG

SEQ ID NO: 72816 - protein, 497 aa, Neisseria meningitidis
MFKRSVIAMACIVALSACGGGGGGSPDVKSADTLSKPAAPVVTEDVGEEVLPKEKKDEEAVSGAPQADTQDATAGKGGQDMAAVSAENTGNGGAATTDNPENKDEGPQNDMPQNAADTDSSTPNHTPAPNMPTRDMGNQAPDAGESAQPANQPDMANAADGMQGDDPSAGGENAGNTAAAESANQTGNNQPAGSSDSAPASNPAPANGGSDFGRVDLANGIKLDSGSENVTLTHCKDKVCDRDFLDEEAPPKSEFESLDDSGRINKYKKDGTSDKFTNLVATEVKANGTNKYVIIYKDKSTSSARVRRSARSRRSLPAEMPLIPVNQADTLIVDGEAVILTGHSGNIFAPEGNYRYLTYGAEKLSGGSYALSVQGEPAKGEMLAGTAVYNGEVLHFHTENGRSYPTKGRFAAKVDFGSKSVDGIIDSGDDLHMGTQKFKAVIDGNGFKGTWTENGGGDVSGRFYGPAGEEVAGKYSHRPTDAEKGGFGVFAGKKEQD

SEQ ID NO: 72817 - protein, 497 aa, Neisseria meningitidis
MFKRSVIAMACIVALSACGGGGGGSPDVKSADTLSKPAAPVVTEDVGEEVLPKEKKDEEAVSGAPQADTQDATAGKGGQDMAAVSAENTGNGGAATTDNPENKDEGPQNDMPQNAADTDSSTPNHTPAPNMPTRDMGNQAPDAGESAQPANQPDMANAADGMQGDDPSAGGENAGNTAAAESANQTGNNQPAGSSDSAPASNPAPANGGSDFGRVDLANGIKLDSGSENVTLTHCKDKVCDRDFLDEEAPPKSEFESLDDSGRINKYKKDGTSDKFTNLVATEVKANGTNKYVIIYKDKSTSSARVRRSARSRRSLPAEMPLILVNQADTLIVDGEAVILTGHSGNIFAPEGNYRYLTYGAEKLSGGSYALSVQGEPAKGEMLAGTAVYNGEVLHFHTENGRSYPTKGRFAAKVDFGSKSVDGIIDSGDDLHMGTQKFKAVIDGNGFKGTWTENGGGDVSGRFYGPAGEEVAGKYSHRPTDAEKGGFGVFAGKKEQD

SEQ ID NO: 72818 - protein, 488 aa, Neisseria meningitidis
MFKRSVIAMACIFALSACGGGGGGSPDVKSADTLSKPAAPVVSEKETEAKEDAPQAGSQGQGAPSAQGGQDMAAVSAENTGNGGAATTDNPENKDEGPQNDMPQNAADTDSSTPNHTPAPNMPTRDMGNQAPDAGESAQPANQPDMANAADGMQGDDPSAGENAGNTADQAANQAENNQVGGSQNPASSTNPNATNGGSDFGRINVANGIKLDSGSENVTLTHCKDKVCDRDFLDEEAPPKSEFEKLSDEEKINKYKKDEQRENFVGLVADRVEKNGTNKYVIIYKDKSASSSSARFRRSARSRRSLPAEMPLIPVNQADTLIVDGEAVSLTGHSGNIFAPEGNYRYLTYGAEKLSGGSYALSVQGEPAKGEMLAGTAVYNGEVLHFHMENGRPSPSGGRFAAKVDFGSKSVDGIIDSGDDLHMGTQKFKAVIDGNGFKGTWTENGGGDVSGRFYGPAGEEVAGKYSYRPTDAEKGGFGVFAGKKEQD

SEQ ID NO: 72819 - protein, 497 aa, Neisseria meningitidis
MFKRSVIAMACIVALSACGGGGGGSPDVKSADTLSKPAAPVVTEDVGEEVLPKEKKDEEAVSGAPQADTQDATAGKGGQDMAAVSAENTGNGGAATTDNPENKDEGPQNDMPQNAADTDSSTPNHTPAPNMPTRDMGNQAPDAGESAQPANQPDMANAADGMQGDDPSAGENAGNTADQAANQAENNQVGGSQNPASSTNPNATNGGSDFGRINVANGIKLDSGSENVTLTHCKDKVCDRDFLDEEAPPKSEFEKLSDEEKINKYKKDEQRENFVGLVADRVEKNGTNKYVIIYKDKSASSSSARFRRSARSRRSLPAEMPLIPVNQADTLIVDGEAVSLTGHSGNIFAPEGNYRYLTYGAEKLSGGSYALSVQGEPAKGEMLAGTAVYNGEVLHFHMENGRPSLSGGRFAAKVDFGSKSVDGIIDSGDDLHMGTQKFKAVIDGNGFKGTWTENGGGDVSGRFYGPAGEEVAGKYSYRPTDAEKGGFGVFAGKKEQD

SEQ ID NO: 72820 - protein, 497 aa, Neisseria meningitidis
MFKRSVIAMACIVALSACGGGGGGSPDVKSADTLSKPAAPVVTEDVGEEVLPKEKKDEEAVSGAPQADTQDATAGKGGQDMAAVSAENTGNGGAATTDNPENKDEGPQNDMPQNAADTDSLTPNHTPAPNMPTRDMGNQAPDAGESAQPANQPDMANAADGMQGDDPSAGENAGNTADQAANQAENNQVGGSQNPASSTNPNATNGGSDFGRINVANGIKLDSGSENVTLTHCKDKVCDRDFLDEEAPPKSEFEKLSDEEKINKYKKDEQRENFVGLVADRVEKNGTNKYVIIYKDKSASSSSARFRRSARSRRSLPAEMPLIPVNQADTLIVDGEAVSLTGHSGNIFAPEGNYRYLTYGAEKLSGGSYALSVQGEPAKGEMLAGTAVYNGEVLHFHMENGRPSPSGGRFAAKVDFGSKSVDGIIDSGDDLHMGTQKFKAVIDGNGFKGTWTENGGGDVSGRFYGPAGEEVAGKYSYRPTDAEKGGFGVFAGKKEQD

SEQ ID NO: 72821 - protein, 497 aa, Neisseria meningitidis; identical to SEQ ID NO: 9967

SEQ ID NO: 72822 - protein, 480 aa, Neisseria meningitidis
MFKRSVIAMACIVALSACGGGGGGSPDVKSADTPSKPAAPVVAEKETEVKEDAPQAGSQGQGAPSTQGSQDMAAVSAENTGNGGSATTDKPKNEDEGPQNDMPQNAADTDSLTPNHTPAPNMPTGDMGNQAPDYGESAQPENQPDAANAGDGIQGDDPSAGGENAGNTAAQGTNQAENNQAAGSQNPASSTNPSTTNSGGDFGRTNVGNSVVIDGPSQNITLTHCKGDSCNDDNLLYEEAPSKSEFESLSDEKKIEKYKKDGEKFTGLVAIKVENNGLNKYTIIYQAQPTRSARSRRSLPAEMPLIPVNQVDTLIVDGEAVSLTGHSGNIFAPEGNYRYLTYGAEKLSGGSYALRVQGEPAKGEMLAGTAVYNGEVLHFHMENGRPSPFRGRFAAKVDFGSKSVDGIIDSGDDLHMGKQKFKAAIDGNGFKGTWTENGGGDVSGRFYGPAGEEVAGKYSYRPTDAEKGGFGVFAGKKEQD

SEQ ID NO: 72823 - protein, 419 aa, Neisseria meningitidis
MFKRSVIAMACIVALSACGGGGGGSPDVKSADTPSKPAAPVVAEKETEVKEDAPQAGSQGQGAPSTQGSQDMAAVSAENTGNGGAATTDNPKNEDEGAQNDMPQNAAESANQTGNNQPAGSQNPAPSTNPNATNGGGNFGRVDLANGVLIDGPSQNITLTHCKGDSCNGDNLLAEEAPSKSEFEKLSDEDKISNYKKDGKDKFVGLIADRVKKDGTNKYIIFYTDKPPTRSARSRRSLPAEIPLIPVNQADTLIVDGEAVSLTGYSGNIFAPEGNYRYLTYGAEKLSGGSYALSVQGEPAKGEMLAGAAVYNGEVLHFHMENGRPYPSGGRFAAKVNFGSKSVDGIIDSGDDLHMGTQKFKAAIDGNGFKGTWTENGGGDVSGRFYGPAGEEVAGKYSYRPTDAEKGGFGVFAGKKEQD

SEQ ID NO: 72824 - protein, 486 aa, Neisseria meningitidis
MFKRSVIAMACIFALSACGGGGGGSPDVKSADTLSKPAAPVVSEKETEAKEDAPQAGSQGQGAPSAQGGQDMAAVSEENTGNGGAAATDKPKNEDEGAQNDMPQNAADTDSLTPNHTPASNMPAGNMENQAPDAGESEQPANQPDMANTADGMQGDDPSAGGENAGNTAAQGANQAGNNQAAGSSDPIPASNPATTNSGGDFGRTNVANGIKLDGPSQNITLTHCKDTVCGSNFLAEEAPSKSEFESLDDSGRINKYKKDGQDKFTNLVATEVKANGTNKYVIIYKDKSTSSARVRRSARSRRSLPAEMPLIPVNQADTLIVDGEAVILTGHSGNIFEPEGNYRYLTYGAEKLSGGSYALRVKGEPAKGEMLAGTAVYNGEVLHFHTENGRSYPTRGRFAAKVDFGSKSVDGIIDSGDDLHMGTQKFKAAIDGNGFKGTWTENGGGDVSGKFYGPAGEEVAGKYSYRPTDAEKGGFGVFAGKKEQD

SEQ ID NO: 72825 - protein, 493 aa, Neisseria meningitidis
MFKRSVIAMACIFALSACGGGGGGSPDVKSADTLSKPAAPVVSEKETEAKEDAPQAGSQGQGAPSAQGSQDMAAVSEENTGNGGAATADNPKNEDEGAQDDMPQNAADTDSLTPNHTPASNMPAVNMENQAPDTGESVQPANQPDAANAGDGIQGNDPSAGGENAGNTAAAESANQTGNNQPAGSSDSAPASNPAPANGGGDFGRTNVGNSVVIDGPSQNITLTHCKGDSCSGNNFLDEEVQLKSEFEKLSDADKISNYKKDGKNDGKNDKFVGLVADSVQMKGINQYIIFYKPKPTSFARFRRSARSRRSLPAEMPLIPVNQADTLIVDGEAVSLTGHSGNIFAPEGNYRYLTYGAEKLSGGSYALRVQGEPAKGEMLAGTAVYNGEVLHFHTENGRSYPTRGRFAAKVDFGSKSVDGIIDSGDDLHMGTQKFKAVIDGNGFKGTWTENGGGDVSGKFYGPAGEEVAGKYSYRPTDAEKGGFGVFAGKKEQD

SEQ ID NO: 72826 - protein, 486 aa, Neisseria meningitidis
MFERSVIAMACIFALSACGGGGGGSPDVKSADTLSKPAAPVVSEKETEAKEDAPQAGSQGQGAPSAQGSQDMAAVSEENTGNGGAATADNPKNEDEGAQDDMPQNAADTDSLTPNHTPASNMPAVNMENQAPDTGESVQPANQPDMANAADGMQGDDPSAGGQNAGNTAAQGANQAGNNQAAGSSDPIPASNPATTNSGGDFGRTNVANGIKLDGPSQNITLTHCKDTVCGSNFLAEEAPSKSEFESLDDSGRINKYKKDGQDKFTNLVATEVKANGTNKYVIIYKDKSTSSARVRRSARSRRSLPAEMPLIPVNQADTLIVDGEAVSLTGHSGNIFAPEGNYRYLTYGAEKLSGGSYALRVQGEPAKGEMLAGTAVYNGEVLHFHTENGRPYPTRGRFAAKVDFGSKSVDGIIDSGDDLHMGTQKFKAAIDGNGFKGTWTENGSGDVSGRFYGPGGEEVAGKYSYRPTDAEKGGFGVFAGKKEQD

SEQ ID NO: 72827 - protein, 479 aa, Neisseria meningitidis
MFKRSVIAMACIFALSACGGGGGGSPDVKSADTPSKPAAPVVAEKETEAKEDAPQAGSQGQGAPSTQGGQDMAAVSAENTGNGGSATTDKPKNEDEGPQNDMPQNAADTDSLTPNHTPDPNMLAGNMENQATDAGESSQPANQPDMANAADGMQGDDPSAGGQNAGNTAAQGANQAGNNQAAGSSDPIPASNPATTNSGGDFGRVDLANGIKLDGGSENVTLTHCKDKVCGSNFLDEEAPSKSEFEKLSDAEKINKYKKNGGKFTGLVATRVENNGLNQYTIIYQAQPTRSARSRRSLPAEMPLIPVNQADTLIVDGEAVSLTGHSGNIFAPEGNYRYLTYGAEKLPGGSYALRVQGEPAKGEMLAGAAVYNGEVLHFHTENGRPYSTRGKFAAKVDFGSKSVDGIIDSGDDLHMGTQKFKAAIDGNGFKGTWTENGGGDVSGKFYGPAGEEVAGKYSYRPTDAEKGGFGVFAGKKEQD

SEQ ID NO: 72828 - protein, 482 aa, Neisseria meningitidis
  misc_feature 437: 'Xaa' is any amino acid
MFKRSVIAMACIFALSACGGGGGGSPDVKSADTLSKPAAPVVSEKETEAKEDAPQAGSQGQGAPSAQGSQDMAAVSEENTGNGGAATADNPKNEDEGAQDDMPQNAADTDSLTPNHTPASNMPAVNMENQAPDTGESVQPANQPDMANAADGMQGDDPSAGGQNAGNTAAQGANQAGNNQAAGSSDPIPASNPATTNSGGDFGRTNVANGIKLDGPSQNITLTHCKGDPCNGDNLLDEEAPSKSEFEKLNESERIEKYKKDGKDKFVGLVATTVKMEGTNKYIIFYTDKPPTRSARSRRSLPAEMPLIPVNQADTLIVDGEAVSLTGHSGNIFAPEGNYRYLTYGAEKLSGGSYALRVQGEPAKGEMLAGTAVYNGEVLHFHTENGRPYPSGGRFAAKVDFGSKSVDGIIDSGDDLHMGTQKFKAAIDGNGFKGTWXENGGGDVSGRFYGPAGEEVAGKYSYHPTDAEKGGFGVFAGKKEQD

SEQ ID NO: 72829 - protein, 427 aa, Neisseria meningitidis
MFERSVIAMACIFALSACGGGGGGSPDVKSADTLSKPAAPVVAEKETEVKEDAPQAGSQGQGAPSTQGSQDMAAVSAENTGNGGAATTDKPKNEDEGPQNDMPQNSAGTANQTGNNQPADSSDSAPASNPAPANGGSNFGRVDLANGVLIDGPSQNITLTHCKGDSCNGDNLLDEEAPSKSEFENLNESERIEKYKKDGKSDKFTNLVATAVQANGTNKYVIIYKDKSASSSSARFRRSARSRRSLPAEMPLIPVNQADTLIVDGEAVSLTGHSGNIFAPEGNYRYLTYGAEKLPGGSYALRVQGEPAKGEMLAGTAVYNGEVLHFHTENGRPYPTRGRFAAKVDFGSKSVDGIIDSGDDLHMGTQKFKAAIDGNGFKGTWTENGGGDVSGRFYGPAGEEVAGKYSYRPTDAEKGGFGVFAGKKEQD

SEQ ID NO: 72830 - protein, 473 aa, Neisseria meningitidis
MFKRSVIAMACIFALSACGGGGGGSPDVKSADTLSKPAAPVVSEKETEAKEDAPQAGSQGQGAPSAQGSQDMAAVSEENTGNGGAATADNPKNEDEGAQDDMPQKAAGTDSSTPNHTPAPNMPAGNMENQPDMANTADRMQGDDPSAGENAGNTAAQGANQAENNQAAGSSDSTPASNPAPTNGGGDFGRTNVANGVLIDGPSQNITLTHCKGDSCSGDNLLDEEAPSKSEFEKLSDADKINNYKKDGKNNNKFVGLVADRVKKDGTNKYIIFYTDNPPTRSARSRRSRRSLPAEMPLIPVNQADTLIVDGEAVSLTGHSGNIFAPEGNYRYLTYGAEKLSGGSYALRVQGEPAKGEMLAGTAVYNGEVLHFHMENGRPSPFRGRFAAKVDFGSKYVDGIIDSGDDLHMGTQKFKAVIDGNGFKGTWTENGGGDVSGRFYGPVGEEVAGKYSYRPTDAEKGGFGVFAGKKEQD

SEQ ID NO: 72831 - protein, 427 aa, Neisseria meningitidis
MFERSVIAMACIFALSACGGGGGGSPDVKSADTLSKPAAPVVAEKETEVKEDEPQAGSQGQGAPSTQGSQDMAAVSAENTGNGGAATTDKPKNEDEGPQNDMPQNSAESANQTGNNQPADSSDSAPASNPAPANGGSNFGRVDLANGVLIDGPSQNITLTHCKGDSCNGDNLLDEEAPSKSEFENLNESERIEKYKKDGKSDKFTNLVATAVQANGTNKYVIIYKDKSASSSSARFRRSARSRRSLPAEMPLIPVNQADTLIVDGEAVSLTGHSGNIFAPEGNYRYLTYGAEKLPGGSYALRVQGEPAKGEMLAGTAVYNGEVLHFHTENGRPYPTRGRFAAKVDFGSKSVDGIIDSGDDLHMGTQKFKAAIDGNGFKGTWTENGGGDVSGRFYGPAGEEVAGKYSYRPTDAEKGGSGVFAGKKEQD

SEQ ID NO: 72832 - protein, 426 aa, Neisseria meningitidis
MFKRSVIAMACIVALSACGGGGGGSPDVKSADTPSKPAAPVVAEKETEVKEDAPQAGSQGQGAPSTQGSQDMAAVSAENTGNGGAATTDKPKNEDEGPQNDMPQNAGNTAAQGTNQAENNQVGGSQNPAPSSNPNATNGGNFGRVDLANGVLIDGPSQNITLTHCKSDSCNGDNLLSEEAPSKSEFEQLSDEDKIKKYKKDGEKFTGLVADRLQMKGTNQYIIFYKPKTTSSARFRRSARSRRSLPAEMPLIPVNQADTLIVDGEAVSLTGHSGNIFAPEGNYRYLTYGAEKLSGGSYALSVQGEPAKGEMLAGTAVYNGEVLHFHTENGRSYPSRGRFAAKVDFGSKSVDGIIDSGDDLHMGTQKFKAAIDGNGFKGTWTENGSGDVSGRFYGPAGEEVAGKYSYRPTDAEKGGFGVFAGKKEQD

SEQ ID NO: 72833 - protein, 501 aa, Neisseria meningitidis
MFKRSVIAMACIVALSACGGGGGGSPDVKSADTLSKPAAPVVTEDVGEEVLPKEKKDEEAVSGAPQADTQDATAGKGGQDMAAVSAENTGNGGAATTDNPENKDEGPQNDMPQNAADTDSSTPNHTPAPNMPTRDMGNQAPDAGESAQPANQPDMANAADGMQGDDPSAGENAGNTADQAANQAANQAENNQVGGSQNPASSTNPNATNGGSDFGRINVANGIKLDSGSENVTLTHCKDKVCDRDFLDEEAPPKSEFEKLSDEEKINKYKKDEQRENFVGLVADRVEKNGTNKYVIIYKDKSASSSSARFRRSARSRRSLPAEMPLIPVNQADTLIVDGEAVSLTGHSGNIFAPEGNYRYLTYGAEKLSGGSYALSVQGEPAKGEMLAGTAVYNGEVLHFHMENGRPSPSGGRFAAKVDFGSKSVDGIIDSGDDLHMGTQKFKAVIDGNGFKGTWTENGGGDVSGRFYGPAGEEVAGKYSYRPTDAEKGGFGVFAGKKEQD

SEQ ID NO: 72834 - protein, 467 aa, Neisseria meningitidis
MFKRSVIAMACIFALSACGGGGGGSPDVKSADTLSKPAAPVVSEKETEAKEDAPQAGSQGQGAPSAQGSQDMAAVSEENTGNGGAATADNPKNEDEGAQDDMPQKAADTDSLTPNHTPAPNMPAGNMENQPDMANTADGIQGDGPSAGENAGNTASAESANQTGNNQSAGSLDSAPASNSAHTNSGGDFGRTNVANGIKLDGGSENVTLTHCKDKVCGSDFLDEEAPSKSEFENLSDEEKIKRYKKDGKNFTGLVATKVEKKGVNKYVIIYTDKTPTRSARSRRSLSEEMPLIPVNQADTLIVDGEAVSLTGHSGNIFAPEGNYRYLTYGAEKLSGGSYALRVQGEPAKGEMLAGTAVYNGEVLHFHTENGRSYPTRGRFAAKVDFGSKSVDGIIDSGDDLHMGTQKFKAAIDGNGFKGTWTENGGGDVSGKFYGPAGEEVAGKYSYRPTDAEKGGFGVFAGKKEQD

SEQ ID NO: 72835 - protein, 487 aa, Neisseria meningitidis
MFKRSVIAMACIFALSACGGGGGGSPDVKSADTLSKPAAPVVSEKETEAKEDAPQAGSQGQGAPSTQGSQDMAAVSAENTGNGGAATTDTPKNEDEGAQDDMPQKAAGTDSLTPNHTPAPNMPAGDMGNQAPDNGESAQPANQPDAANAGDGIQGDDPSAGENAGNTASAESANQTGNNQPAGSSDSAPASNPAPANGGSNFGRVDLANGIKLDSGSENVTLTHCKDTVCGSDFLDEEAPSKSEFESLSDEKKIEKYKKDGEKFTNLVATEVQANGVNKYVIIYKDKSASSSSARFRRSARSRRSLPAEMPLIPVNQADTLIIDGEAVSLTGHSGNIFAPEGNYRYLTYGAEKLSGGSYALRVQGEPAKGEMLAGTAVYNGEVLHFHMENGRPSPSGGRFAAKVDFGSKSVDGIIDSGDDLHMGTQKFKAVIDGNGFKGTWTENGGGDVSGRFYGPAGEEVAGKYSYRPTDAEKGGFGVFAGKKEQD

SEQ ID NO: 72836 - protein, 425 aa, Neisseria meningitidis; identical to SEQ ID NO: 22608

SEQ ID NO: 72837 - protein, 481 aa, Neisseria meningitidis
MFKRSVIAMACIFALSACGGGGGGSPDVKSADTLSKPAAPVVSEKETEAKEDAPQAGSQGQGAPSAQGSQNMAAVSEENTGNGGAATADNPKNEDEGAQDDMPQKAADTDSLTPNHTPAPNMPAGNMENQATDAGESEQPANQPDMANTADGMQGDDPSAGGENAGNTAAQGANQAGNNQAAGSSDSTPASNSATTNSGSDFGRTNVANGVLIDGPSQNITLTHCKGDSCSGDNLLDEEAPPKSEFENLSDEEKIKRYKKDGKNFTGLVATKVEKKGVNKYVIIYTDKTPTRSARSRRSLSEEMPLIPVNQADTLIVDGEAVSLTGHSGNIFALEGNYRYLTYGAEKLPGGSYALRVQGEPAKGEMLAGAAVYNGEVLHFHTENGRSYPTRGRFAAKVDFGSKSVDGIIDSGDDLHMGKQKFKAVIDGNGFKGTWTENGGGDVSGRFYGPAGEEVAGKYSYRPTDAEKGGFGVFAGKKEQD

SEQ ID NO: 72838 - protein, 419 aa, Neisseria meningitidis
MFKRSVIAMACIVALSACGGGGGGSPDVKSADTPSKPAAPVVAEKETEVKEDAPQAGSQGQGAPSTQGSQDMAAVSAENTGNGGAATTDNPKNEDEGAQNDMPQNAAESANQTGNNQPAGSQNPAPSTNPNATNGGGNFGRVDLANGVLIDGPSQNITLTHCKGDSCNGDNLLAEEAPSKSEFEKLSDEDKISNYKKDGKDKFVGLIADRVKKDGTNKYIIFYTDKPPTRSARSRRSLPAEIPLIPVNQADTLIVDGEAVSLTGYSGNIFAPEGNYRYLTYGAEKLSGGSYALSVQGEPAKGEMLAGAAVYNGEVLHFHMENGRPYPSGGRFAAKVNFGSKSVDGIIDSGDDLHMGTQKFKAAIDGNGFKGTWTENGSGDVSGRFYGPGGEEVAGKYSYRPTDAEKGGFGVFAGKKEQD

SEQ ID NO: 72839 - protein, 486 aa, Neisseria meningitidis
MFERSVIAMACIFALSACGGGGGGSPDVKSADTLSKPAAPVVAEKETEVKEDAPQAGSQGQGAPSTQGSQDMAAVSEENTGNGGAATADNPKNEDEGAQDDMPQKAAGTDSSTPNHTPDPNMPAGNMENQATDAGESEQPANQPDMANTADGMQGDDPSAGGENAGNTAAQGANQAGNNQAAGSSDPIPASNPATTNSGGDFGRTNVANGIKLDGPSQNITLTHCKDTVCGSNFLAEEAPSKSEFESLDDSGRINKYKKDGQDKFTNLVATEVKANGTNKYVIIYKDKSTSSARVRRSARSRRSLPAEMPLIPVNQADTLIVDGEVVSLTGHSGNIFAPEGNYRYLTYGAEKLSGGSYALRVQGEPAKGEMLAGTAVYNGEVLHFHTENGRSYPTRGRFAAKVDFGSKSVDGIIDSGDDLHMGTQKFKAVIDGNGFKGNWTENGGGDVSGRFYGPAGEEVAGKYSYRPTDAEKGGFGVFAGKKEQD

SEQ ID NO: 72840 - protein, 474 aa, Neisseria meningitidis
MFKRSVIAMACIFALSACGGGGGGSPDVKSADTLSKPAAPVVSEKETEAKEDAPQAGSQGQGAPSAQGSQDMAAVSEENTGNGGAVTADNPKNEDEVAQNDMPQNAAGTDSSTPNHTPDPNMLAGNMENQATDAGESSQPANQPDMANAADGMQGDDPSAGGQNAGNTAAQGANQAGNNQAAGSSDPIPASNPAPANGGSNFGRVDLANGVLIDGPSQNITLTHCKGDSCSGNNFLDEEVQLKSEFEKLSDADKISNYKKDGKNDKFVGLVADSVQMKGINQYIIFYKPKPTSFARFRRSARSRRSLPAEMPLIPVNQADTLIVDGEAVSLTGHSGNIFAPEGNYRYLTYGAEKLPGGSYALRVQGEPAKGEMLAGAAVYNGEVLHFHTENGRPYPTRGRFAAKVDFGSKSVDGIIDSGDDLHMGTQKFKAAIDGNGFKGTWTENGSGDVSGKFYGPAGEEVAAKKSRIDVDAV

SEQ ID NO: 72841 - protein, 496 aa, Neisseria meningitidis
MFKRSVIAMACIFALSACGGGGGGSPDVKSADTLSKPAAPVVAEDVEEEVLPKEKKDEEAVGGAPQADTQDTTAGKGGQDMAAVSEENTGNGGAATADNPKNEDEAQNDMPQNTAGTDSLTPNHTPASNMPAGNMENQAPDAGESAQPANQPDMANAADGMQGDDPSAGGENAGNTAAAESANQTGNNQPAGSSDSAPASNPAPANGGSDFGRVDLANGIKLDSGSENVTLTHCKDKVCDRDFLDEEAPPKSEFESLDDSGRINKYKKDGTSDKFTNLVATEVKANGTNKYVIIYKDKSTSSARVRRSARSRRSLPAEMPLIPVNQADTLIVDGEAVILTGHSGNIFAPEGNYRYLTYGAEKLSGGSYALSVQGEPAKGEMLAGTAVYNGEVLHFHTENGRSSPFRGRFAAKVDFGSKSVDGIIDSGDDLHMGTQKFKAVIDGNGFKGTWTENGGGDVSGRFYGPAGEEVAGKYSHRPTDAEKGGFGVFAGKKEQD

SEQ ID NO: 72842 - protein, 486 aa, Neisseria meningitidis
MFERSVIAMACIFALSACGGGGGGSPDVKSADTLSKPAAPVVSEKETEAKEDAPQAGSQGQGAPSAQGSQDMAAVSEENTGNGGAATADNPKNEDEGAQDDMPQNAADTDSLTPNHTPASNMPAVNMENQAPDTGESVQPANQPDMANAADGMQGDDPSAGGQNAGNTAAQGANQAGNNQAAGSSDPIPASNPATTNSGGDFGRTNVANGIKLDGPSQNITLTHCKDTVCGSNFLAEEAPSKSEFESLDDSGRINKYKKDGQDKFTNLVATEVKANGTNKYVIIYKDKSTSSARVRRSARSRRSLPAEMPLIPVNQADTLIVDGEAVSLTGHSGNIFEPEGNYRYLTYGAEKLPGGSYALRVQGEPSKGEMLAGAAVYNGEVLHFHTENGRPYPTRGRFAAKVDFGSKSVDGIIDSGDDLHMGTQKFKAVIDGNGFKGTWTENGSGDVSGKFYGPAGEEVAGKYSYRPTDAEKGGFGVFAGKKEQD

SEQ ID NO: 72843 - protein, 427 aa, Neisseria meningitidis
MFKRSVIAMACIVALSACGGGGGGSPDVKSADTPSKPAAPVVAEKETEVKEDAPQAGSQGQGAPSTQGSQDMAAVSAENTGNGGAATTDKPKNEDEGPQNDMPQNSAESANQTGNNQPADSSDSAPASNPAPANGGSNFGRVDLANGVLIDGPSQNITLTHCKGDSCNGDNLLDEEAPSKSEFENLNESERIEKYKKDGKSDKFTNLVATAVQANGTNKYVIIYKDKSASSSSARFRRSARSRRSLPAEMPLIPVNQADTLIVDGEAVSLTGHSGNIFAPEGNYRYLTYGAEKLSGGSYALSVQGEPAKGEMLAGTAVYNGEVLHFHMENGRPSPSGGRFAAKVDFGSKSVDGIIDSGDDLHMGTQKFKAVIDGNGFKGTWTENGGGDVSGRFYGPAGEEVAGKYSYRPTDAEKGGFGVFAGKKEQD

SEQ ID NO: 72844 - protein, 488 aa, Neisseria meningitidis
MFKRSVIAMACIFALSACGGGGGGSPDVKSADTLSKPVAPVVSEKETEAKEDAPQAGSQGQGAPSAQGSQDMAAVSEENTGNGGAATTDTPKNEDAGAQNDMPQNAADTNSSTPNHATAPNMPTGDMGNQAPDNGESAQPANQPDAANAGDGIQGDDPSAGENAGNTASAESANQTGNNQPAGSSDSAPASNPAPANGGSNFGRTNVGNSVVIDGPSQNITLTHCKGDSCDNGNLLDEEAPSKSEFEKLSESERMEKYKKDGKSNKFTGFVADRLQMKGTNQYIIFYKPKPTSSVRFRRSARSRRSLPAEMPLIPVNQADTLIVDGEAVSLTGHSGNIFAPEGNYRYLTYGAEKLPGGSYALRVQGEPSKGEMLAGTAVYNGEVLHFHTENGRPSPSRGRFAAKVDFGSKSVDGIIDSGDGLHMGTQKFKAAIDGNGFKGTWTENGGGDVSGKFYGPAGEEVAGKYSYRPTDAEKGGFGVFAGKKEQD

SEQ ID NO: 72845 - protein, 494 aa, Neisseria meningitidis
MFKRSVIAMACIFALSACGGGGGGSPDVKSADTPSKPAAPVVAEDAGEEVLPKENKDEEAVSGAPQADTQDATAGKGDQDMAAVSAENTGNGGAATADNPKNEDEGAKNDMPQNAATDSLTPNHTPAPNMPTVDMGNQAPDAGESAQPENQPNMANTADGMQGDDSSAGGETTADMAAQGANQAENNQAAGSSDSTPASNPATTNSGGDFGRTNVGNSVVIDGPSQNITLTHCKDKVCSSELLDEEVLLKSEFEKLSNEEKIKQYKKDGRDKFTNLVATEVQANGVNKYVIIYKDKSASSAQFRRSARSRRSLPAEMPLIPVNQADTLIVDGEAVILTGHSGNIFEPEGNYRYLTYGAEKLSGGSYALSVQGEPAKGEMLAGTAVYNGEVLHFHTENGRSYPTKGRFAAKVDFGSKSVDGIIDSGDDLHMGTQKFKAAIDGNGFKGTWTENGSGDVSGKFYGPAGEEVAGKYSYRPTDAEKGGFGVFAGKKEQD

SEQ ID NO: 72846 - protein, 426 aa, Neisseria meningitidis
MFERSVIAMACIFALSACGGGGGGSPDVKSADTLSKPAAPVVAEKETEVKEDAPQAGSQGQGAPSTQGSQDMAAVSAENTGNGGAATTDKPKNEDEGPQNDMPQNAGNTAAQGTNQAENNQVGGSQNPAPSSNPNATNGGNFGRVDLANGVLIDGPSQNITLTHCKSDSCNGDNLLSEEAPSKSEFEQLSDEDKIKKYKKDGEKFTGLVADRLQMKGTNQYIIFYKPKTTSSARFRRSARSRRSLPAEMPLIPVNQADTLIVDGEAVSLTGHSGNIFAPEGNYRYLTYGAEKLSGGSYALRVQGEPAKGEMLAGTAVYNGEVLHFHMENGRSYPSRGRFAAKVDFGSKSVDGIIDSGDDLHMGTQKFKAAIDGNGFKGTWTENGGGDVSGRFYGPAGEEVAGKYSYRPKDAEKGGFGVFAGKKEQD

SEQ ID NO: 72847 - protein, 423 aa, Neisseria meningitidis
MFERSVIAMACIFALSACGGGGGGSPDVKSADTPSKPAAPVVAEKETDAKEDAPQAGSQGQGAPSAQGSQDMAAVSEENTGNGGAATADNPKNEDEGAQNDMPQNAAESANQTGNNQPAGSQNPAPSTNPNATNGGGDFGRTNVANGVLIDGPSQNITLTHCKDTVCGSNFLAEEAPSKSEFESLDDSGRINKYKKDGQDKFTNLVATEVKANGTNKYVIIYKDKSTSSARVRRSARSRRSLPAEMPLIPVNQADTLIVDGEAVSLTGHSGNIFAPEGNYRYLTYGAEKLSGGSYALSVQGEPAKGEMLAGTAVYNGEVLHFHMENGRPSPSGGRFAAKVDFGSKSVDGIIDSGDDLHMGTQKFKAVIDGNGFKGTWTENGGGDVSGRFYGPAGEEVAGKYSYRPTDAEKGGFGVFAGKKEQD

SEQ ID NO: 72848 - protein, 426 aa, Neisseria meningitidis
MFKRSVIAMACIVALSACGGGGGGSPDVKSADTPSKPAAPVVAEKETEVKEDAPQAGSQGQGAPSTQGSQDMAAVSAENTGNGGAATTDKPKNEDEGPQNDMPQNAGNTAAQGTNQAENNQVGGSQNPAPSSNPNATNGGNFGRVDLANGVLIDGPSQNITLTHCKSDSCNGDNLLSEEAPSKSEFEQLSDEDKIKKYKKDGEKFTGLVADRLQMKGTNQYIIFYKPKTTSSARFRRSARSRRSLPAEMPLIPVNQADTLIVDGEAVSLTGHSGNIFAPEGNYRYLTYGAEKLSGGSYALRVQGEPAKGEMLAGTAVYNGEVLHFHTENGRPYPSGGRFAAKVDFGSKSVDGIIDSGDDLHMGTQKFKAAIDGNGFKGTWTENGSGDVSGKFYGPAGEEVAGKYSYRPTDAEKGGFGVFAGKKEQD

SEQ ID NO: 72849 - protein, 494 aa, Neisseria meningitidis; identical to SEQ ID NO: 4717

SEQ ID NO: 72850 - protein, 426 aa, Neisseria meningitidis
MFKRSVIAMACIVALSACGGGGGGSPDVKSADTPSKPAAPVVAEKETEVKEDAPQAGSQGQGAPSTQGSQDMAAVSAENTGNGGAATTDKPKNEDEGPQNDMPQNAGNTAAQGTNQAENNQVGGSQNPAPSSNPNATNGGNFGRVDLANGVLIDGPSQNITLTHCKSDSCNGDNLLSEEAPSKSEFEQLSDEDKIKKYKKDGEKFTGLVADRLQMKGTNQYIIFYKPKTTSSARFRRSARSRRSLPAEMPLIPVNQADTLIVDGEAVSLTGHSGNIFAPEGNYRYLTYGAEKLSGGSYALRVQGEPAKGEMLAGTAVYNGEVLHFHTENGRPYPSGGRFAAKVDFGSKSVDGIIDSGDDLHMGTQKFKAVIDGNGFKGTWTENGGGDVSGRFYGPAGEEVAGKYSYRPTDAGKGGFGVFAGKKEQD

SEQ ID NO: 72851 - protein, 427 aa, Neisseria meningitidis
MFKRSVIAMACIFALSACGGGGGGSPDVKSADTPSKPAAPVVAEKETEVKEDAPQAGSQGQGAPSTQGSQDMAAVSAENTGNGGAATTDNPKNEDEGAQNDMPQNAAESANQTGNNQPAGSQNPAPSTNPNATNGGGNFGRVDLANGVLIDGPSQNITLTHCKGDSCSGNNFLDEEVQLKSEFEKLSDADKISNYKKDGKNDGKNDKFVGLFAYRVKKDGINKYIIFYTDNPPTRSARSRRLRRSLPAEMPLIPVNQADTLIVDGEAVSLTGHSGNIFALEGNYRYLTYGAEKLSGGSYALRVQGEPAKGEMLAGTAVYNGEVLHFHMENGRPSPSRGRFAAKVDFGSKSVDGSIDSGDDLHMGTQKFKAVIDGNGFKGAWTENGGGDVSGRFYGPAGEEVAGKYSYRPTDAEKGGFGVFAGKKEQD

SEQ ID NO: 72852 - protein, 479 aa, Neisseria meningitidis
MFKRSVIAMACIFALSACGGGGGGSPDVKSADTPSKPAAPVVAEKETEAKEDAPQAGSQGQGAPSTQGSQDMAAVSAENTGNGGAATTDKPKNEDEGPQNDMPQNAADTDSSTSNYTPAPNMPAGDMENQAPDNGESAQPANQPDMENAADGIQGDDPSAGGENAGNTAAQGTNQAENNQAAGSSDSASASNPAPANGGGDFGRVDLANGIKLDGGSENVTLTHCKDKVCGSDFLDEEAPSKSEFESLSDEKKIEKYKKDGEKFTGLVAIKVENNGLNKYTIIYQAQPTRSARSRRSLPAEMPLIPVNQADTLIVDGEAVSLTGHSGNIFAPEGNYRYLTYGAEKLSGGSYALRVQGEPAKGEMLAGTAVYNGEVLHFHMENGRPSPFRGRFAAKVDFGSKSVDGIIDSGDDLHMGTQKFKAAIDGNGFKGNWTENGGGDVSGRFYGPVGEEVAGKYSYRPTDAEKGGFGVFAGKKEQD

SEQ ID NO: 72853 - protein, 427 aa, Neisseria meningitidis
MFKRSVIAMACIVALSACGGGGGGSPDVKSADTLSKPAAPVVAEKETEVKEDAPQAGSQGQGAPSTQGSQDMAAVSAENTGNGGAATTDKPKNEDEGPQNDMPQNSAESANQTGNNQPADSSDSAPASNPAPANGGSNFGRVDLANGVLIDGPSQNITLTHCKGDSCNGDNLLDEEAPSKSEFENLNESERIEKYKKDGKSDKFTNLVATAVQANGTNKYVIIYKDKSASSSSARFRRSARSRRSLPAEMPLIPVNQADTLIVDGEAVSLTGHSGNIFAPEGNYRYLTYGAEKLSGGSYALSVQGEPAKGEMLAGTAVYNGEVLHFHMENGRPSPSGGRFAAKVDFGSKSVDGIIDSGDDLHMGTQKFKAVIDGNGFKGTWTENGGGDVSGRFYGPAGEEVAGKYSYRPTDAEKGGFGVFAGKKEQD

SEQ ID NO: 72854 - protein, 419 aa, Neisseria meningitidis
MFKRSVIAMACIFALSACGGSGGGSPDVKSADTPSKPAAPVVAEKETEAKEDAPQAGSQGQGAPSAQGSQDMAAVSAENTGNGDAATTDKPKNEDEGAQNDMPQNAAESANQTGNNQPADSSDSAPASNPAPANGGSNFGRVDLANGVLIDGPSQNITLTHCKGDSCNGDNLLDEEAPSKSEFEKLSDEDKISNYKKDGKDKFVGLVADRVKKDGTNKYIIFYTDKPPTRSARSRRSLPAEIPLIPVNQADTLIVDGEAVSLTGHSGNIFAPEGNYRYLTYGAEKLSGGSYALRVQGEPAKGEMLAGTAVYNGEVLHFHMENGRPSPFRGRFAAKVDFGSKSVDGIIDSGDDLHMGTQKFKAVIDGNGFKGAWTENSGGDVSGRFYGPAGEEVAGKYSYRPTDAEKGGFGVFAGKKEQD

SEQ ID NO: 72855 - protein, 472 aa, Neisseria meningitidis
MFKRSVIAMACIFALSACGGGGGGSPDVKSADTLSKPAAPVVSEKETEAKEDAPQAGSQGQGAPSAQGSQDMAAVSEENTGNGGAATADNPKNEDEGAQDDMPQKAAGTDSLTPNHTPAPNMPAGNMENQPDMANTADGMQGDDPSAGENAGNTAAQGANQAENNQAAGSSDSTPASNPAPTNSGGDFGRTNVANGIKLDGPSQNITLTHCKDTVCGSNFLAEEAPSKSEFESLDDSGRINKYKKDGQDKFTNLVATEVKANGTNKYVIIYKDKSTSSARVRRSARSRRSLPAEMPLIPVNQADTLIVDGEAVSLTGHSGNIFEPEGNYRYLTYGAEKLPGGSYALRVQGEPSKGEMLAGAAVYNGEVLHFHTENGRPYPTRGRFAAKVDFGSKSVDGIIDSGDDLHMGTQKFKAVIDGNGFKGTWTENGSGDVSGKFYGPAGEEVAGKYSYRPTDAEKGGFGVFAGKKEQD

SEQ ID NO: 72856 - protein, 435 aa, Neisseria meningitidis
MFKRSVIAMACIVALSACGGGGGGSPDVKSADTLSKPAAPVVTEDVGEEVLPKEKKDEEAVSGAPQADTQDATAGKGGQDMAAVSAENTGNGGAATTDKPKNEDEGPQNDMPQNAGNTAAQGTNQAENNQVGGSQNPAPSSNPNATNGGNFGRVDLANGVLIDGPSQNITLTHCKSDSCNGDNLLSEEAPSKSEFEQLSDEDKIKKYKKDGEKFTGLVADRLQMKGTNQYIIFYKPKTTSSARFRRSARSRRSLPAEMPLIPVNQADTLIVDGEAVSLTGHSGNIFAPEGNYRYLTYGAEKLSGGSYALSVQGEPAKGEMLAGTAVYNGEVLHFHTENGRSYPTKGRFAAKVDFGSKSVDGIIDSGDDLHMGKQKFKAAIDGNGFKGTWTENGGGDVSGRFYGPAGEEVAGKYSYRPTDAEKGGFGVFAGKKEQD

SEQ ID NO: 72857 - protein, 486 aa, Neisseria meningitidis
MFKRSVIVMACIFALSACGGGGGGSPDVKSADTLSKPAAPVVAEDAGEEVLPKEKKDEEAVGGAPQADTQDATAGENSQDMAAVSAENTGNGGSATTDNPKNEDEGAQDDMPQKAADTDSLTPNHTPAPNMPAVNMENQPDMANTADGMQGDDPSAGENAGNTASAESANQTGNNQPAGSSDSAPASNPAPANGGSNFGRVDLANGVLIDGPSQNITLTHCKGDSCNGDNLLDEEAPSKSEFENLNESERIEKYKKDGKSDKFTNLVATAVQANGTNKYVIIYKDKSASSSSARFRRSARSRRSLPAEMPLIPVNQADTLIVDGEAVSLTGHSGNIFAPEGNYRYLTYGAEKLPGGSYALRVQGEPAKGEMLAGTAVYNGEVLHFHTENGRPYPTRGRFAAKVDFGSKSVDGIIDSGDDLHMGTQKFKAAIDGNGFKGTWTENGGGDVSGRFYGPAGEEVAGKYSYRPTDAEKGGFGVFAGKKEQD

SEQ ID NO: 72858 - protein, 419 aa, Neisseria meningitidis
MFKRSVIAMACIFALSACGGSGGGSPDVKSADTPSKPAAPVVAEKETEAKEDAPQAGSQGQGAPSAQGSQDMAAVSAENTGNGDAATTDKPKNEDEGAQNDMPQNAAESANQTGNNQPADSSDSAPASNPAPANGGSNFGRVDLANGVLIDGPSQNITLTHCKGDSCNGDNLLDEEAPSKSEFEKLSDEDKISNYKKDGKDKFVGLVADRVKKDGTNKYIIFYTDKPPTRSARSRRSLPAEIPLIPVNQADTLIVDGEAVSLTGHSGNIFAPEGNYRYLTYGAEKLSSGSYALRVQGEPAKGEMLAGTAVYNGEVLHFHMENGRPSPFRGRFAAKVDFGSKSVDGIIDSGDDLHMGTQKFKAVIDGNGFKGAWTENSGGDVSGRFYGPAGEEVAGKYSYRPTDAEKGGFGVFAGKKEQD

SEQ ID NO: 72859 - protein, 487 aa, Neisseria meningitidis
MFKRSVIAMACIVALSACGGGGGGSPDVKSADTPSKPAAPVVAEKETEVKEDAPQAGSQGQDVPSKQGSQDMAAVSAENTGNGGSATTDKPKNEDEGPQNDMPQNAADTDSLTPNHTPAPNMPTGDMGNQAPDSGESAQPANQPDMANAADGIQGDDPSVGENAGNTADQAENQAENNQAAGSQNPASSTNPNATNGGGDFGRTNVGNSVVIDGPSQNITLTHCKGDSCDGDNLLDEEAPSKSEFDNLSESERMEKYKKDGKSDKFTGFVADKLQMKGTNQYIIFYKPKTTSSARFRRSARLRRSLPAEMPLIPVNQADTLIVDGEAVSLTGHSGNIFAPEGNYRYLTYGAEKLSGGSYALSVQGEPAKGEMLAGTAVYNGEVLHFHTENGRPYPSRGRFAAKVDFGSKSVDGIIDSGDDLHMGTQKFKAAIDGNGFKGTWTENGSGDVSGKFYGPAGEEVAGKYSYRPTDAEKGGFGVFAGKKEQD

SEQ ID NO: 72860 - protein, 427 aa, Neisseria meningitidis
MFKRSVIAMACIFALSACGGGGGGSPDVKSADTPSKPAAPVVAEKETEVKEDAPQAGSQGQGAPSTQGSQDMAAVSAENTGNGGAATTDNPKNEDEGAQNDMPQNAAESANQTGNNQPAGSQNPAPSTNPNATNGGGNFGRVDLANGVLIDGPSQNITLTHCKGDSCSGNNFLDEEVQLKSEFEKLSDADKISNYKKDGKNDGKNDKFVGLFAYRVKKDGINKYIIFYTDNPPTRSARSRRLRRSLPAEMPLIPVNQADTLIVDGEAVSLTGHSGNIFAPEGNYRYLTYGAEKLSGGSYALRVQGEPAKGEMLAGTAVYNGEVLHFHMENGRPSPSRGRFAAKVDFGSKSVDGSIDSGDDLHMGTQKFKAVIDGNGFKGAWTENGGGDVSGRFYGPAGEEVAGKYSYRPTDAEKGGFGVFAGKKEQD

SEQ ID NO: 72861 - protein, 482 aa, Neisseria meningitidis
MFKRSVIAMACIFALSACGGGGGGSPDVKSADTLSKPAAPVVAEDAGEEVLPKEKKDEEAVGGAPQADTQDATAGENSQDMAAVSAENTGNGGSATTDNPKNEDEGAQDDMPQKAADTDSLTPNHTPAPNMPAVNMENQPDMANTADGMQGDDPSAGENAGNTASAESANQTGNNQPAGSSDSAPASNPAPANGGGDFGRTNVANGIKLDGPSQNITLTHCKDTVCGSNFLAEEAPSKSEFESLDDSGRIDKYKKDGQDKFTNLVATEVKANGTNKYVIIYKDKSTSSARFRRSARSRRSLPAEMPLIPVNQADTLIVDGEAVSLTGHSGNIFAPEGNYRYLTYGAEKLPGGSYALRVQGEPSKGEMLAGTAVYNGEVLHFHTENGRPSPSRGRFAAKVDFGSKSVDGIIDSGDGLHMGTQKFKAAIDGNGFKGTWTENGGGDVSGKFYGPAGEEVAGKYSYRPTDAEKGGFGVFAGKKEQD

SEQ ID NO: 72862 - protein, 418 aa, Neisseria meningitidis
MFKRSVIAMACIFALSACGGSGGGSPDVKSADTPSKPAAPVVAEKETEAKEDAPQAGSQGQGAPSAQGSQDMAAVSAENTGNGDAATTDKPKNEDEGAQNDMPQNAAESANQTGNNQPADSSDSAPASNPAPANGGSNFGRVDLANGVLIDGPSQNITLTHCKGDSCNGDNLLDEEAPSKSEFEKLSDEDKISNYKKDGKDKFVGLVADRVKKDGTNKYIIFYTDKPPTRSARSRRSLPAEIPLIPVNQADTLIVDGEAVSLTGHSGNIFAPEGNYRYLTYGAEKLSSGSYALRVQGEPAKGEMLAGTAVYNGEVLHFHMENGRPSPFRGRFAAKVDFGSKSVDGIIDSGDDLHMGTQKFKAVIDGNGFKGAWTENSGGDVSGRFYGPAGEEVAGKYSYRPTDAEKGFGVFAGKKEQD

SEQ ID NO: 72863 - protein, 427 aa, Neisseria meningitidis
MFKRSVIAMACIVALSACGGGGGGSPDVKSADTPSKPAAPVVAEKETEVKEDAPQAGSQGQGAPSTQGSQDMAAVSAENTGNGGAATTDKPKNEDEGPQNDMPQNAGNTAAQGTNQAENNQVGGSQNPAPSSNPNATNGGNFGRVDLANGVLIDGPSQNITLTHCKSDSCNGDNLLSEEAPSKSEFEQLSDEDKIKKYKKDGEKFTGLVADRLQMKGTNQYIIFYKPKTTSSARFRRSARSRRSLPAEMPLIPVNQADTLIVDGEAVSLTGHSGNIFAPEGNYRYLTYGAEKLSGGSYALRVQGEPAKGEMLAGTAVYNGEVLHFHTENGRPYPSGGRFAAKVDFGSKSVDGIIDSGDDLHMGTQKFKAVIDGNGFKGTWTENGGGDVSGRFYGPAGEEVAGKYSYRPTDAGKGGFGVFAGKKEQDD

SEQ ID NO: 72864 - protein, 479 aa, Neisseria meningitidis
MFKRSVIAMACIVALSACGGGGGGSPDVKSADTPSKPAAPVVAEKETEVKEDAPQAGSQGQDVPSKQGSQDMAAVSAENTGNGGSATTDKPKNEDEGPQNDMPQNAADTDSLTPNHTPAPNMPTGDMGNQAPDSGESAQPANQPDMANAADGIQGDDPSVGENAGNTADQAENQAENNQPAGSQNPAPSTNPNATNGGGDFGRTNVGNSVVIDGPSQNITLTHCKGDSCNDDNLLYEEAPSKSEFESLSDEKKIEKYKKDGEKFTGLVAIKVENNGLNKYTIIYQAQPTRSARSRRSLPAEMPLIPVNQADTLIVDGEAVSLTGHSGNIFAPEGNYRYLTYGAEKLSGGSYALRVQGEPAKGEMLAGTAVYNGEVLHFHTENGRSYPTRGRFAAKVDFGSKSVDGIIDSGDDLHMGTQKFKAAIDGNGFKGTWTENGGGDVSGKFYGPAGEEVAGKYSYRPTDAEKGGFGVFAGKKEQD

SEQ ID NO: 72865 - protein, 426 aa, Neisseria meningitidis
MFKRSVIAMACIVALSACGGGGGGSPDVKSADTPSKPAAPVVAEKETEVKEDAPQAGSQGQGAPSTQGSQDMAAVSAENTGNGGAATTDKPKNEDEGPQNDMPQNAGNTAAQGTNQAENNQVGGSQNPAPSSNPNATNGGNFGRVDLANGVLIDGPSQNITLTHCKSDSCNGDNLLSEEAPSKSEFEQLSDEDKIKKYKKDGEKFTGLVADRLQMKGTNQYIIFYKPKTTSSARFRRSARSRRSLPAEMPLIPVNQADTLIVDGEAVSLTGHSGNIFAPEGNYRYLTYGAEKLSGGSYALSVQGEPAKGEMLAGTAVYNGEVLHFHMENGRPSPSGGRFAAKVDFGSKSVDGIIDSGDDLHMGTQKFKAVIDGNGFKGTWTENGGGDVSGRFYGPAGEEVAGKYSYRPTDAEKGGFGVFAGKKEQD

SEQ ID NO: 72866 - protein, 427 aa, Neisseria meningitidis
MFKRSVIAMACIVALSACGGGGGGSPDVKSADTPSKPAAPVVAEKETEVKEDAPQAGSQGQGAPSTQGSQDMAAVSAENTGNGGAATTDKPKNEDEGPQNDMPQNSAESANQTGNNQPADSSDSAPASNPAPANGGSNFGRVDLANGVLIDGPSQNITLTHCKGDSCNGDNLLDEEAPSKSEFENLNESERIEKYKKDGKSDKFTNLVATAVQANGTNKYVIIYKDKSASSSSARFRRSARSRRSLPAEMPLIPVNQADTLIVDGEAVSLTGHSGNIFAPEGNYRYLTYGAEKLPGGSYALRVQGEPAKGEMLAGTAVYNGEVLHFHTENGRPYPTRGRFAAKVDFGSKSVDGIIDSGDDLHMGTQKFKAAIDGNGFKGTWTENGGGDVSGRFYGPAGEEVAGKYSYRPTDAEKGGFGVFAGKKEQD

SEQ ID NO: 72867 - protein, 478 aa, Neisseria meningitidis
MFKRSVIAMACIFALSACGGGGGGSPDVKSADTPSKPAVPVVAEKETEAKEDAPQAGSQGQGAPSAQGSQDMAAVSEENTGNGGAATADNPKNEDEAQNDMPQNTAGTDSLTPNHTPASNMPAGNMENQAPDAGESEQPANQPDMANTADGMQGDDPSAGGENAGNTAAQGANQAENNQAAGSSDSTPASNPAQTNSGGNFGRVDLANGVLIDGPSQNITLTHCKDKVCSSDLLDEEVLPKSDFEKLSNAEKIKQYKKNGGKFTGLVATRVENNGLNQYTIIYQAQPTRSARSRRSLSAEMPLIPVNQADTLIVDGEAVSLTGHSGNIFALEGNYRYLTYGAEKLPGGSYALRVQGEPAKGEMLAGAAVYNGEVLHFHTENGRSYPTRGRFAAKVDFGSKSVDGIIDSGDDLHMGTQKFKAAIDGNGFKGTWTENGGGDVSGKFYGPAGEEVAGKYSYRPTDAEKGGFGVFAGKKEQD

SEQ ID NO: 72868 - protein, 429 aa, Neisseria meningitidis
MFKRSVIAMACIVALSACGGGGGGSPDVKSADTPSKPAAPVVAEKETEVKEDAPQAGSQGQGAPSTQGSQDMAAVSAENTGNGGAATTDNPKNEDEGAQNDMPQNAAESANQTGNNQPAGSQNPASSTNPSATNSGGDFGRTNVGNSVVIDGPSQNITLTHCKGDSCSGNNFLDEEVQLKSEFEKLSDADKISNYKKDGKNDGKNDKFVGLVADSVQMKGINQYIIFYKPKPTSFARFRRSARSRRSLPAEMPLIPVNQADTLIVDGEAVSLTGHSGNIFAPEGNYRYLTYGAEKLPGGSYALRVQGEPSKGEMLAGTAVYNGEVLHFHTENGRPSPSRGRFAAKVDFGSKSVDGIIDSGDGLHMGTQKFKAAIDGNGFKGTWTENGGGDVSGKFYGPAGEEVAGKYSYRPTDAEKGGFGVFAGKKEQD

SEQ ID NO: 72869 - protein, 423 aa, Neisseria meningitidis
MFKRSVIAMACIFALSACGGGGGGSPDVKSADTPSKPAAPVVAEKETEAKEDAPQAGSQGQGAPSAQGSQDMAAVSEENTGNGGAATADNPKNEDEGAQNDMPQNAAESANQTGNNQPAGSQNPAPSTNPNATNGGGDFGRTNVANGVLIDGPSQNITLTHCKDTVCGSNFLAEEAPSKSEFESLDDSGRINKYKKDGQDKFTNLVATEVKANGTNKYVIIYKDKSTSSARVRRSARSRRSLPAEMPLIPVNQADTLIVDGEAVSLTGHSGNIFAPEGNYRYLTYGAEKLSGGSYALRVQGEPAKGEMLAGTAVYNGEVLHFHMENGRPSPFRGRFAAKVDFGSKSVDGIIDSGDDLHMGTQKFKAAIDGNGFKGNWTENGGGDVSGRFYGPVGEEVAGKYSYRPTDAEKGGFGVFAGKKEQD

SEQ ID NO: 72870 - protein, 492 aa, Neisseria meningitidis
MFKRSVIAMACIVALSACGGGGGGSPDVKSADTPSKPAAPVVAEKETEVKEDAPQAGSQGQGAPSTQGSQDMAAVSEENTGNGGAAATDKPKNEDEGAQNDMPQNAADTDSLTPNHTPASNMPAGNMENQAPDAGESEQPANQPDMANTADGMQGDDPSAGGENAGNTAAQGTNQAENNQTAGSQNPASSTNPSATNSGGDFGRTNVGNSVVIDGPSQNITLTHCKGDSCSGNNFLDEEVQLKSEFEKLSDADKISNYKKDGKNDGKNDKFVGLVADSVQMKGINQYIIFYKPKPTSFARFRRSARSRRSLPAEMPLIPVNQADTLIVDGEAVSLTGHSGNIFAPEGNYRYLTYGAEKLPGGSYALRVQGEPSKGEMLAGTAVYNGEVLHFHTENGRPSPSRGRFAAKVDFGSKSVDGIIDSGDGLHMGTQKFKAAIDGNGFKGTWTENGGGDVSGKFYGPAGEEVAGKYSYRPTDAEKGGFGVFAGKKEQD

SEQ ID NO: 72871 - protein, 482 aa, Neisseria meningitidis
MFKRSVIAMACIFALSACGGGGGGSPDVKSADTLSKPAAPVVSEKETEAKEDAPQAGSQGQGAPSAQGSQDMAAVSEENTGNGGAATADNPKNEDEGAQDDMPQNAADTDSLTPNHTPASNMPAVNMENQAPDTGESVQPANQPDMANAADGMQGDDPSAGGQNAGNTAAQGANQAGNNQAAGSSDPIPASNPATTNSGGDFGRTNVANGIKLDGPSQNITLTHCKGDPCNGDNLLDEEAPSKSEFEKLNESERIEKYKKDGKDKFVGLVATTVKMEGTNKYIIFYTDKPPTRSARSRRSLPAEMPLIPVNQADTLIVDGEAVSLTGHSGNIFAPEGNYRYLTYGAEKLSGGSYALRVQGEPAKGEMLAGTAVYNGEVLHFHTENGRPYPSGGRFAAKVDFGSKSVDGIIDSGDDLHMGTQKFKAAIDGNGFKGTWTENGGGDVSGRFYGPAGEEVAGKYSYHPTDAEKGGFGVFAGKKEQD

SEQ ID NO: 72872 - protein, 497 aa, Neisseria meningitidis
MFKRSVIAMACIVALSACGGGGGGSPDVKSADTLSKPAAPVVTEDVGEEVLPKEKKDEEAVSGAPQADTQDATAGKGGQDMAAVSAENTGNGGAATTDNPENKDEGPQNDMPQNAADTDSSTPNHTPAPNMPTRDMGNQAPDAGESAQPANQPDMANAADGMQGDDPSAGENAGNTADQAANQAENNQVGGSQNPASSTNPNATNGGSDFGRINVANGIKLDSGSENVTLTHCKDKVCDRDFLDEEAPPKSEFEKLSDEEKINKYKKDEQRENFVGLVADRVEKNGTNKYVIIYKDKSASSSSARFRRSARSRRSLPAEMPLIPVNQADTLIVDGEAVSLTGHSGNIFAPEGNYRYLTYGAEKLSGGSYALSVQGEPAKGEMLAGTAVYNGEVLHFHMENGRPSPSGGRFAAKVDFGSKSVDGIIDSGDDLHMGKQKFKAVIDGNGFKGTWTENGGGDVSGRFYGPAGEEVAGKYSYRPTDAEKGGFGVFAGKKEQD

SEQ ID NO: 72873 - protein, 497 aa, Neisseria meningitidis
MFKRSVIAMACIVALSACGGGGGGSPDVKSADTLSKPAAPVVTEDVGEEVLPKEKKDEEAVSGAPQADTQDATAGKGGQDMAAVSAENTGNGGAATTDNPENKDEGPQNDMPQNAADTDSSTPNHTPAPNMPTRDMGNQAPDAGESAQPANQPDMANAADGMQGDDPSAGGENAGNTAAAESANQTGNNQPAGSSDSAPASNPAPANGGSDFGRVDLANGIKLDSGSENVTLTHCKDKVCDRDFLDEEAPPKSEFESLDDSGRINKYKKDGTSDKFTNLVATEVKANGTNKYVIIYKDKSTSSARVRRSARSRRSLPAEMPLIPVNQADTLIVDGEAVILTGHSGNIFAPEGNYRYLTYGAEKLSGGSYALSVQGEPAKGEMLAGTAVYNGEVLHFHTENGRSYPTKGRFAAKVDFGSKSVDGIIDSGDDLHMGTQKFKAAIDGNGFKGTWTENGGGDVSGRFYGPAGEEVAGKYSHRPTDAEKGGFGVFAGKKEQD

SEQ ID NO: 72874 - protein, 479 aa, Neisseria meningitidis
MFKRSVIAMACIFALSACGGGGGGSPDVKSADTPSKPAVPVVAEDAGEEVLPKEKKDEEAVGGALQADTQDATAGEGSQDMAAVSAENTGNGGAATTDKPKNEDEGAQNDMPQNAADTDSLTPNHTTAPNMPAGNMENQPDAANAGDGIQGDDPSAGGENAGNTAAAESANQTGNNQPAGSSDSAPASNPAPANGGGDFGRTNVGNSVVIDGPSQNITLTHCKGDSCDNGNLLDEEAPSKSEFEKLNESERIEKYKKDGKDKFVGLVATTVKMEGTNKYIIFYTDKPPTRSARSRRSLPAEMPLIPVNQADTLIVDGEAVSLTGHSGNIFAPEGNYRYLTYGAEKLPGGSYALRVQGEPAKGEMLAGTAVYNGEVLHFHTENGRSYPTKGRFAAKVDFGSKSVDGIIDSGDDLHMGTQKFKAAIDGNGFKGTWTENGSGDVSGRFYGPSGEEVAGKYSYRPTDAEKGGFGVFAGKKEQD

SEQ ID NO: 72875 - protein, 473 aa, Neisseria meningitidis
MFKRSVIAMACIFALSACGGGGGGSPDVKSADTLSKPAAPVVSEKETEAKEDAPQAGSQGQGAPSAQGSQDMAAVSEENTGNGGAATADNPKNEDEGAQDDMPQKAAGTDSSTPNHTPAPNMPAGNMENQPDMANTADRMQGDDPSAGENAGNTAAQGANQAENNQAAGSSDSTPASNPAPTNGGGDFGRTNVANGVLIDGPSQNITLTHCKGDSCSGDNLLDEEAPSKSEFEKLSDADKINNYKKDGKNNNKFVGLVADRVKKDGTNKYIIFYTDNPPTRSARSRRSRRSLPAEMPLIPVNQADTLIVDGEAVSLTGHSGNIFAPEGNYRYLTYGAEKLSGGSYALRVQGEPAKGEMLAGTAVYNGEVLHFHTENGRPYPTRGRFAAKVDFGSKSVDGIIDSGDDLHMGTQKFKAAIDGNGFKGTWTENGSGDVSGRFYGPGGEEVAGKYSYRPTDAEKGGFGVFAGKKEQD

SEQ ID NO: 72876 - protein, 424 aa, Neisseria meningitidis
MFERSVIAMACIFALSACGGGGGGSPDVKSADTLSKPAAPVVAEKETEVKEDAPQAGSQGQGAPSTQGSQDMAAVSAENTGNGGAATTDKPKNEDEGPQNDMPQNSAESANQTGNNQPADSSDSAPASNPAPANGGSDFGRVDLANGIKLDSGSENVTLTHCKDKVCDRDFLDEEAPPKSEFESLDDSGRINKYKKDGTSDKFTNLVATEVKANGTNKYVIIYKDKSTSSARVRRSARSRRSLPAEMPLIPVNQADTLIVDGEAVILTGHSGNIFAPEGNYRYLTYGAEKLPGGSYALRVQGEPAKGEMLAGAAVYNGEVLHFHTENGRSYPTRGRFAAKVDFGSKSVDGIIDSGDDLHMGTQKFKAAIDGNGFKGTWTENGGGDVSGKFYGPAGEEVAGKYSYRPTDAEKGGFGVFAGKKEQD

SEQ ID NO: 72877 - protein, 488 aa, Neisseria meningitidis
MFKRSVIAMACIFALSACGGGGGGSPDVKSADTLSKPAAPVVSEKETEAKEDAPQAGSQGQGAPSAQGSQDMAAVSEENTGNGGAVTADNPKNEDEVAQNDMPQNAAGTDSSTPNHTPDPNMLAGNMENQATDAGESSQPANQPDMANAADGMQGDDPSAGGQNAGNTAAQGANQAGNNQAAGSSDPIPASNPAPANGGSNFGRVDLANGVLIDGPSQNITLTHCKGDSCSGNNFLDEEVQLKSEFEKLSDADKISNYKKDGKNDKFVGLVADSVQMKGINQYIIFYKPKPTSFARFRRSARSRRSLPAEMPLIPVNQADTLIVDGEAVSLTGHSGNIFAPEGNYRYLTYGAEKLPGGSYALRVQGEPAKGEMLAGAAVYNGEVLHFHTENGRPYPTRGRFAAKVDFGSKSVDGIIDSGDDLHMGTQKFKAAIDGNGFKGTWTENGSGDVSGKFYGPAGEEVAGKYSYHPTDAEKGGFGVFAGKKEQD

SEQ ID NO: 72878 - protein, 497 aa, Neisseria meningitidis
MFKRSVIAMACIVALSACGGGGGGSPDVKSADTLSKPAAPVVTEDVGEEVLPKEKKDEEAVSGAPQADTQDATAGKGGQDMAAVSAENTGNGGAATTDNPENKDEGPQNDMPQNAADTDSSTPNHTPAPNMPTRDMGNQAPDAGESAQPANQPDMANAADGMQGDDPSAGGENAGNTAAAESANQTGNNQPAGSSDSAPASNPAPANGGSDFGRVDLANGIKLDSGSENVTLTHCKDKVCDRDFLDEEAPPKSEFESLDDSGRINKYKKDGTSDKFTNLVATEVKANGTNKYVIIYKDKSTSSARVRRSARSRRSLPAEMPLILVNQADTLIVDGEAVILTGHSGNIFAPEGNYRYLTYGAEKLSGGSYALSVQGEPAKGEMLAGTAVYNGEVLHFHTENGRSYPTKGRFAAKVDFGSKSVDGIIDSGDDLHMGTQKFKAVIDGNGFKGTWTENGGGDVSGRFYGPAGEEVVGKYSHRPTDAEKGGFGVFAGKKEQD

SEQ ID NO: 72879 - protein, 497 aa, Neisseria meningitidis
MFKRSVIAMACIVALSACGGGGGGSPDVKSADTLSKPAAPVVTEDVGEEVLPKEKKDEEAVSGAPQADTQDATAGKGGQDMAAVSAENTGNGGAATTDNPENKDEGPQNDMPQNAADTDSSTPNHPPAPNMPTRDMGNQAPDAGESAQPANQPDMANAADGMQGDDPSAGENAGNTADQAANQAENNQVGGSQNPASSTNPNATNGGSDFGRINVANGIKLDSGSENVTLTHCKDKVCDRDFLDEEAPPKSEFEKLSDEEKINKYKKDEQRENFVGLVADRVEKNGTNKYVIIYKDKSASSSSARFRRSARSRRSLPAEMPLIPVNQADTLIVDGEAVSLTGHSGNIFAPEGNYRYLTYGAEKLSGGSYALSVQGEPAKGEMLAGTAVYNGEVLHFHMENGRPSPSGGRFAAKVDFGSKSVDGIIDSGDDLHMGTQKFKAVIDGNGFKGTWTENGGGDVSGRFYGPAGEEVAGKYSYRPTDAEKGGFGVFAGKKEQD

SEQ ID NO: 72880 - protein, 419 aa, Neisseria meningitidis
MFKRSVIAMACIVALSACGGGGGGSPDVKSADTPSKPTAPVVAEKETEAKEDAPQAGSQGQGAPSTQGSQDMAAVSAENTGNGGAATTDNPKNEDEGSQNDMPQNAAESANQTGNNQPAGSQNPAPSTNPNATNGGGDFGRTNVGNSVVIDGPSQNITLTHCKGDSCTGDNLLSEEAPSRSEFESLNDSGRIDKYKKDGQDKFTNLVATKVEKKGLNKYIIFYTDKPPTRSARSRRSLPTEMPLIPVNQADTLIIDGEAVSLTGHFGNIFAPEGNYRYLTYGAEKLPGGSYALRVQGEPAKGEMLAGTAVYNGEVLHFHTENGRPYPTRGRFAAKVDFGSKSVDGIIDSGDDLHMGTQKFKAAIDGNGFKGTWTENGGGDVSGRFYGPAGEEVAGKYSYRPTDAEKGGFGVFAGKKEQD

SEQ ID NO: 72881 - protein, 482 aa, Neisseria meningitidis
MFKRSVIAMACIFALSACGGGGGGSPDVKSADTPSKPAAPVVAEKETEAKENAPQADSQGQGAPSTQGSQDMAAVSAENTGNGGSATTDKPKNEDEGPQNDMPQNAADTDSLTPNHTPAPNMPAGDMENQAPDNGESAQPANQPDMANAADGMQGDDPSAGGENAGNTADQAANQAENNQAAGSQNPAPSSNSNAANGGGDFGRTNVGNSVVIDGPSQNITLTHCKGDSCNDDNLLDEEAPSKSEFEKLSESERMEKYKKDGKGKFVGLVATTVKMEGTNKYIIFYTDNPPTRSARSRRSLPAEMPLIPVNQADTLIVDGEAVSLTGHSGNIFAPEGNYRYLTYGAEKLPGGSYALRVQGEPAKGEMLAGTAVYNGEVLHFHTENGRPSPSRGRFAAKVDFGSKSVDGIIDSGDGLHMGTQKFKAAIDGNGFKGTWTENGGGDVSGRFYGPAGEEVAGKYSYRPKDAEKGGFGVFAGKKEQD

SEQ ID NO: 72882 - protein, 487 aa, Neisseria meningitidis
MFKRSVIAMACIFALSACGGGGGGSPDVKSADTPSKPAAPVVAEDAGEEVLPKEKKDEEAVGGAPQADTQDETAGENSQDMAVVSAENTGNGGAATTDKPKNEDEGAQNDMPQNAADTDSLIPNHTPAPNMPAGDMENQAPDNGESVQPANQPDAANAGDGIQGDDPSAGGENAGDQAANQAENNQVGGSQNPAPSTNPSTTNGGDFGRVDLANGIKLDGGSENVTLTHCKDKVCGSDFLDEEAPPKSEFESLSDEERIKKYKKNGGKFTGLVATRVENNGLNQYTIIYQAQPTRSARSRRSRRSLPAEIPLIPVNQADTLIVDGEAVSLTGHSGNIFAPEGNYRYLTYGAEKLPGGSYALRVQGEPAKGEMLAGTAVYNGEVLHFHTENGRPSPFRGRFAAKVDFGSKSVDGIIDSGDDLHMGTQKFKAAIDGNGFKGTWTENGSGDVSGKFYGPAGEEVAGKYSYRPTDAEKGGFGVFAGKKEQD

SEQ ID NO: 72883 - protein, 434 aa, Neisseria meningitidis
MFERSVIAMACIFALSACGGGGGGSPDVKSADTLSKPAVPVVAEDTEEVLPKEKKDEEAVGGAPQADTQDATAGKGSQDMAAVSAENTGNGGAATTDKPKNEDEGPQNDMPQNAGNTAAQGTNQAENNQVGGSQNPAPSSNPNATNGGNFGRVDLANGVLIDGPSQNITLTHCKSDSCNGDNLLSEEAPSKSEFEQLSDEDKIKKYKKDGEKFTGLVADRLQMKGTNQYIIFYKPKTTSSARFRRSARSRRSLPAEMPLIPVNQADTLIVDGEAVSLTGHSGNIFAPEGNYRYLTYGAEKLSGGSYALSVQGEPAKGEMLAGTAVYNGEVLHFHTENGRSYPTKGRFAAKVDFGSKSVDGIIDSGDDLHMGKQKFKAAIDGNGFKGTWTENGGGDVSGRFYGPAGEEVAGKYSYRPTDAEKGGFGVFAGKKEQD

SEQ ID NO: 72884 - protein, 496 aa, Neisseria meningitidis
MFKRSVIAMACIVALSACGGGGGGSPDVKSADTLSKPAAPVVAEDAGEEVLPKEKKDEEAVGGAPQADTQDETAGENSQDMAVVSAENTGNGGAATTDKPKNEDEGAQNDMPQNAADTDSLTPNHTTAPNMPTGDMGNQAPDSGESAQPANQPDMANAADGMQGDDPSAGGENAGNTAAQGTNQAENNQAAGSSDSTPASNPAPTNGGGDFGRTNVANGVLIDGPSQNITLTHCKGDSCSGDNLLDEEAPSKSEFEKLSDADKINNYKKDGKNNNKFVGLVADRVKKDGTNKYIIFYTDNPPTRSARSRRSRRSLPAEMPLIPVNQADTLIVDGEAVSLTGHSGNIFAPEGNYRYLTYGAEKLPGGSYALRVQGEPAKGEMLAGAAVYNGEVLHFHTENGRPYPTRGRFAAKVDFGSKSVDGIIDSGDDLHMGTQKFKAAIDGNGFKGTWTENGSGDVSGKFYGPAGEEVAGKYSYRPTDAEKGGFGVFAGKKEQD

SEQ ID NO: 72885 - protein, 426 aa, Neisseria meningitidis
MFKRSVIAMACIVALSACGGGGGGSPDVKSADTPSKPAAPVVAEKETEVKEDAPQAGSQGQGAPSTQGSQDMAAVSAENTGNGGAATTDKPKNEDEGPQNDMPQNAGNTAAQGTNQAENNQVGGSQNPAPSSNPNATNGGNFGRVDLANGVLIDGPSQNITLTHCKSDSCNGDNLLSEEAPSKSEFEQLSDEDKIKKYKKDGEKFTGLVADRLQMKGTNQYIIFYKPKTTSSARFRRSARSRRSLPAEMPLIPVNQADTLIVDGEAVSLTGHSGNIFAPEGNYRYLTYGAEKLSGGSYALSVQGEPAKGEILAGTAVYNGEVLHFHTENGRSYPTKGRFAAKVDFGSKSVDGIIDSGDDLHMGKQKFKAAIDGNGFKGTWTENGGGDVSGRFYGPAGEEVAGKYSYRPTDAEKGGFGVFAGKKEQD

SEQ ID NO: 72886 - protein, 427 aa, Neisseria meningitidis
MFERSVIAMACIFALSACGGGGGGSPDVKSADTLSKPAAPVVAEKETEVKEDAPQAGSQGQGAPSTQGSQDMAAVSAENTVNGGAATTDKPKNEDEGPQNDMPQNSAESANQTGNNQPADSSDSAPASNPAPANGGSNFGRVDLANGVLIDGPSQNITLTHCKGDSCNGDNLLDEEAPSKSEFENLNESERIEKYKKDGKSDKFTNLVATAVQANGTNKYVIIYKDKSASSSSARFRRSARSRRSLPAEMPLIPVNQADTLIVDGEAVSLTGHSGNIFAPEGNYRYLTYGAEKLPGGSYALRVQGEPAKGEMLAGTAVYNGEVLHFHTENGRPYPTRGRFAAKVDFGSKSVDGIIDSGDDLHMGTQKFKAAIDGNGFKGTWTENGGGDVSGRFYGPAGEEVAGKYSYRPTDAEKGGFGVFAGKKEQD

SEQ ID NO: 72887 - protein, 487 aa, Neisseria meningitidis
MFERSVIAMACIFALSACGGGGGGSPDVKSTDTPSKPAAPVVAEKETEVKEDAPQAGSQGQGAPSAQGGQDMAAVSEENTGNGGAATADNPKNEDEAQNDMPQNTAGTDSLTPNHTPASNMPAGNMENQAPDAGESAQPENQPDMANAADGIQGDDPSADGENAGNTAAAESANQTGNNQPAGSSDSAPASNPAPANGGSDFGRVDLANGIKLDSGSENVTLTHCKDKVCDRDFLDEEAPPKSEFESLDDSGRINKYKKDGTSDKFTNLVATEVKANGTNKYVIIYKDKSTSSARVRRSARSRRSLPAEMPLIPVNQADTLIVDGEAVILTGHSGNIFAPEGNYRYLTYGAEKLPGGSYALRVQGEPAKGEMLAGAAVYNGEVLHFHTENGRSYPTRGRFAAKVDFGSKSVDGIIDSGDDLHMGTQKFKAAIDGNGFKGTWTENGGGDVSGKFYGPAGEEVAGKYSYRPTDAEKGGFGVFAGKKEQD

SEQ ID NO: 72888 - protein, 435 aa, Neisseria meningitidis
MFKRSVIAMACIVALSACGGGGGGSPDVKSADTLSKPAAPVVTEDVGEEVLPKEKKDEEAVSGAPQADTQDATAGKGGQDMAAVSAENTGNGGAATTDNPENEDEGPQNDMPQNAGNTAAQGTNQAENNQVGGSQNPAPSSNPNATNGGNFGRVDLANGVLIDGPSQNITLTHCKSDSCNGDNLLSEEAPSKSEFEQLSDEDKIKKYKKDGEKFTGLVADRLQMKGTNQYIIFYKPKTTSSARFRRSARSRRSLPAEMPLIPVNQADTLIVDGEAVSLTGHSGNIFAPEGNYRYLTYGAEKLSGGSYALRVQGEPAKGEMLAGTAVYNGEVLHFHTENGRSYPTKGRFAAKVDFGSKSVDGIIDSGDDLHMGKQKFKAAIDGNGFKGTWTENGGGDVSGRFYGPAGEEVAGKYSYRPTDAEKGGFGVFAGKKEQD

SEQ ID NO: 72889 - protein, 345 aa, Neisseria meningitidis
MFKRSVIAMACIFALSACGGGGGGSPDVKSADTPSKPAAPVVAEDAGEEVLPKEKKDEEAVGGAPQADTQDETAGENSQDMAVVSAENTGNGGAATTDKPKNEDEGAQNDMPQNAADTDSLIPNHTPAPNMPAGDMENQAPDNGESVQPANQPDAANAGDGIQGDDPSAGGENAGDQAANQAENNQVGGSQNPAPSTNPSTTNGGDFGRVDLANGIKLDGGSENVTLTHCKDKVCGSDFLDEEAPPKSEFESLSDEERIKKYKKNGGKFTGLVATRVENNGLNQYTIIYQAQPTRSARSRRSRRSLPAEIPLIPVNQADTLIVDGEAVSLTGHSGNIFAPEGNYR

SEQ ID NO: 72890 - protein, 482 aa, Neisseria meningitidis
MFKRNVIAMACIFALSACGGGGGGSPDVKSADTLSKPVAPVVSEKETEAKEDAPQAGSQGQGAPSAQGSQNMAAVSEENTGNGGAATADNPKNEDEGAQDDMPQKAADTDSLTPNHTPAPNMPAGNMENQATDAGESEQPANQPDMANTADGMQGDDPSAGGENAGNTAAQGANQAGNNQAAGSSDSTPASNSATTNSGGDFGRTNVGNSVVIDGPSQNITLTHCKGDPCNGNNLLDEEAPSKSEFEKLNESERIEKYKKDGKDKFVGLVATTVKMEGTNKYIIFYTDKPPTRSARSRRSLPAEMPLIPVNQADTLIVDGEAVSLTGHSGNIFAPEGNYRYLTYGAEKLSGGSYALSVQGEPAKGEMLAGTAVYNGEVLHFHMENGRPYPFRGRFAAKVDFGSKSVDGIIDSGDDLHMGTQKFKAAIDGNGFKGTWTENGGGDVSGKFYGPAGEEVAGKYSYRPTDAEKGGFGVFAGKKEQD

SEQ ID NO: 72891 - protein, 427 aa, Neisseria meningitidis
MFERSVIAMACIFALSACGGGGGGSPDVKSADTLSKPAAPVVAEKETEVKEDAPQAGSQGQGAPSTQGSQDMAAVSAENTGNGGAATTDKPKNEDEGPQNDMLQNSAESANQTGNNQPADSSDSAPASNPAPANGGSNFGRVDLANGVLIDGPSQNITLTHCKGDSCNGDNLLDEEAPSKSEFENLNESERIEKYKKDGKSDKFTNLVATAVQANGTNKYVIIYKDKSASSSSARFRRSARSRRSLPAEMPLIPVNQADTLIVDGEAVSLTGHSGNIFAPEGNYRYLTYGAEKLSGGSYALRVQGKPAKGEMLAGTAVYNGEVLHFHTENGRSYPTRGRFAAKVDFGSKSVDGIIDSGDDLHMGTQKFKAAIDGNGFKGNWTENGGGDVSGRFYGPAGEEVAGKYSYRPTDAEKGGFGVFAGKKEQD

SEQ ID NO: 72892 - protein, 479 aa, Neisseria meningitidis
MFKRSVIAMACIFALSACGGGGGGSPDVKSADTLSKPAAPVVSEKETEAKEDAPQAGSQGQSEPSTQGGQDMAAVSAENTGNGGAAATDKPKNEDEGAQNDMPQNAADTDSLTPNHTPDPNMLAGNMENQATDAGESSQPANQPDMANAADGMQGDDPSAGGQNAGNTAAQGANQAGNNQAAGSSDPIPASNPATTNSGGDFGRVDLANGIKLDGGSENVTLTHCKDKVCGSNFLDEEAPSKSEFEKLSDAEKINKYKKNGGKFTGLVATRVENNGLNQYTIIYQAQPTRSARSRRSLPAEMPLIPVNQADTLIVDGEAVSLTGHSGNIFAPEGNYRYLTYGAEKLPGGSYALRVQGEPAKGEMLAGAAVYNGEVLHFHTENGRPYPTRGRFAAKVDFGSKSVDGIIDSGDDLHMGTQKFKAAIDGNGFKGTWTENGSGDVSGKFYGPAGEEVAGKYSYRPTDAEKGGFGVFAGKKEQD

SEQ ID NO: 72893 - protein, 426 aa, Neisseria meningitidis
MFERSVIAMACIFALSACGGGGGGSPDVKSADTPSKPAAPVVAEKETDAKEDAPQAGSQGQGAPSAQGSQDMAAVSEENTGNGGAATADNPKNEDEGAQDDMPQNAAESANQTGNNQPAGSSDSAPASNPAPANGGSNFGRVDLANGIKLDSGSENVTLTHCKDKVCGSDFLDEEAPSKSEFESLDDSGRINKYKKDGKSDKFTNLVATAVQANGLNKYVIIYKDKSASSSSARFRRSARSRRSLPAEMPLIPVNQADTLIVDGEAVSLTGHSGNIFAPEGNYRYLTYGAEKLSGGSYALSVQGEPAKGEMLAGTAVYNGEVLHFHTENGRPYPTRGRFAAKVDFGSKSVDGIIDSGDDLHMGTQKFKAVIDGNGFKGTWTENGGGDVSGRFYGPAGEEVAGKYSYRPTDAEKGGFGVFAGKKEQD

SEQ ID NO: 72894 - protein, 487 aa, Neisseria meningitidis
MFKRSVIAMACIFALSACGGGGGGSPDVKSADTLSKPAAPVVSEKETEAKEDAPQAGSQGQGAPSTQGSQDMAAVSAENTGNGGAATTDTPKNEDEGAQDDMPQKAAGTDSLTPNHTPAPNMPAGDMGNQAPDNGESAQPANQPDAANAGDGIQGDDPSAGENAGNTASAESANQTGNNQPAGSSDSAPASNPAPANGGSNFGRVDLANGIKLDSGSENVTLTHCKDTVCGSDFLDEEAPSKSEFESLSDEKKIEKYKKDGEKFTNLVATEVQANGVNKYVIIYKDKSASSSSARFRRSARSRRSLPAEMPLIPVNQADTLIIDGEAVSLTGHSGNIFAPEGNYRYLTYGAEKLSGGSYALRVQGEPAKGEMLAGTAVYNGEVLHFHMENGRPSPSGGRFAAKVDFGSKSVDGIIDSGDDLHMGTQKFKAVIDGNGFKGTWTENGGGDVSGKFYGPAGEEVAGKYSYRPTDAEKGGFGVFAGKKEQD

SEQ ID NO: 72895 - protein, 485 aa, Neisseria meningitidis
MFKRSVIAMACIFALSACGGGGGGSPDVKSADTLSKPAAPVVSEKETEAKEDAPQAGSQGQGAPSAQGGQDMAAVSEENTGNGGAAATDKPKNEDEGAQNDMPQNAADTDSLTPNHTPASNMPAGNMENQAPDAGESEQPANQPDMANTADGMQGDDPSAGGENAGNTAAQGTNQAENNQTAGSQNPASSTNPNATNGGGDFGRTNVGNSVVIDGPSQNITLTHCKGDSCSGNNFLDEEVQLKSEFESLNDSGRIDKYKKDGQDKFTNLVATKVEKKGLNKYVIFYTDTPPTRSARSRRLRRSLPAEMPLIPVNQADTLIVDGEAVILTGHSGNIFAPEGNYRYLTYGAEKLSGGSYALRVQGEPAKGEMLAGTAVYNGEVLHFHMENGRPSPFRGRFAAKVDFGSKSVDGIIDSGDDLHMGTQKFKAAIDGNGFKGAWTENSGGDVSGRFYGPAGEEVAGKYSYRPTDAEKGGFGVFAGKKEQD

SEQ ID NO: 72896 - protein, 492 aa, Neisseria meningitidis
MFKRSVIAMACIFALSACGGGGGGSPDVKSADTLSKPAAPVVSEKETEAKEDAPQAGSQGQGAPSAQGGQDMAAVSEENTGNGGAAATDKPKNEDEGAQNDMPQNAADTDSLTPNHTPASNMPAGNMENQAPDAGESEQPANQPDMANTADGMQGDDPSAGGENAGNTAAQGTNQAENNQTAGSQNPASSTNPSATNSGGDFGRTNVGNSVVIDGPSQNITLTHCKGDSCSGNNFLDEEVQLKSEFEKLSDADKISNYKKDGKNDGKNDKFVGLVADSVQMKGINQYIIFYKPKPTSSARVRRSARSRRSLPAEMPLIPVNQADTLIVDGEAVILTGHSGNIFAPEGNYRYLTYGAEKLSGGSYALSVQGEPAKGEMLAGTAVYNGEVLHFHTENGRSYPTKGRFAAKVDFGSKSVDGIIDSGDDLHMGTQKFKAVIDGNGFKGTWTENGGGDVSGRFYGPAGEEVAGKYSHRPTDAEKGGFGVFAGKKEQD

SEQ ID NO: 72897 - protein, 494 aa, Neisseria meningitidis
MFKRSVIAMACIFALSACGGGGGGSPDVKSADTLSKPAAPVVAEDAGEEVLPKEKKDEEAVGGAPQADTQDATAGENSQDMAAVSAENTGNGGSATTDKPKNEDEGPQNDMPQNAADTDSLTPNHTPAPNMPTGDMGNQAPDSGESAQPANQPDMANAADGIQGDDPSVGENAGNTAAQGTNQAENNQAAGSSDSAPASNPAPANGGSNFGRVDLANGIKLDGGSENVTLTHCKDKVCGSDFLDEEAPSKSEFESLDDSGRINKYKKDGQDKFTNLVATEVKANGTNKYVIIYKDKSTSSVRVRRSARSRRSLPAEMPLIPVNQADTLIVDGEAVSLTGHSGNIFAPEGNYRYLTYGAEKLSGGSYALSVQGEPAKGEMLAGTAVYNGEVLHFHTENGRPSPFRGRFAAKVDFGSKSVDGIIDSGDDLHMGKQKFKAAIDGNGFKGNWTENGGGDVSGRFYGPAGEEVAGKYSYRPTDAEKGGFGVFAGKKEQD

SEQ ID NO: 72898 - protein, 423 aa, Neisseria meningitidis
MFERSVIAMACIFALSACGGGGGGSPDVKSADTLSKPAAPVVAEKETEVKEDAPQAGSQGQGAPSTQGSQDMAAVSAENTGNGGAATTDKPKNEDEGPQNDMLQNSAESANQTGNNQPADSSDSAPASNPATTNSGGDFGRTNVANGIKLDGPSQNITLTHCKDTVCGSNFLAEEAPSKSEFESLDDSGRINKYKKDGQDKFTNLVATEVKANGTNKYVIIYKDKSTSSARVRRSARSRRSLPAEMPLIPVNQADTLIVDGEAVSLTGHSGNIFAPEGNYRYLTYGAEKLSGGSYALRVQGEPAKGEMLAGTAVYNGEVLHFHTENGRPYPTRGRFAAKVDFGSKSVDGIIDSGDDLHMGTQKFKAAIDGNGFKGTWTENGSGDVSGRFYGPGGEEVAGKYSYRPTDAEKGGFGVFAGKKEQD

SEQ ID NO: 72899 - protein, 492 aa, Neisseria meningitidis
MFKRSVIAMACIFALSACGGGGGGSPDVKSADTLSKPAAPVVSEKETEAKEDAPQAGSQGQGAPSAQGGQDMAAVSEENTGNGGAAATDKPKNEDEGAQNDMPQNAADTDSLTPNHTPASNMPAGNMENQAPDAGESEQPANQPDMANTADGMQGDDPSAGGENAGNTAAQGTNQAENNQTAGSQNPASSTNPSATNSGGDFGRTNVGNSVVIDGPSQNITLTHCKGDSCSGNNFLDEEVQLKSEFEKLSDADKISNYKKDGKNDGKNDKFVGLVADSVQMKGINQYIIFYKPKPTSFARFRRSARSRRSLPTEMPLIPVNQADTLIIDGEAVSLTGHFGNIFAPEGNYRYLTYGAEKLPGGSYALRVQGEPAKGEMLAGTAVYNGEVLHFHTENGRPSPFRGRFAAKVDFGSKSVDGIIDSGDDLHMGKQKFKAAIDGNGFKGNWTENGGGDVSGRFYGPAGEEVAGKYSYRPTDAEKGGFGVFAGKKEQD

SEQ ID NO: 72900 - protein, 425 aa, Neisseria meningitidis
MFERSVIAMACIFALSACGGGGGGSPDVKSADTLSKPAAPVVAEKETEVKEDAPQAGSQGQGAPSTQGSQDMAAVSAENTGNGGAATTDKPKNEDEGPQNDMPQNSAESANQTGNNQPADSSDSAPASNPAPANGGSNFGRVDLANGVLIDGPSQNITLTHCKGDSCNGDNLLDEEAPSKSEFENLNESERIEKYKKDGKSDKFTNLVATAVQANGTNKYVIIYKDKSTSSARVRRSARSRRSLPAEMPLIPVNQADTLIVDGEAVSLTGHSGNIFAPEGNYWYLTYGAEKLSGGSYALSVQGEPAKGEMLAGTAVYNGEVLHFHTENGRSYPTKGRFAAKVDFGSKSVDGIIDSGDDLHMGKQKFKAAIDGNGFKGTWTENGGGDVSGRFYGPAGEEVAGKYSYRPTDAEKGGFGVFAGKKEQD

SEQ ID NO: 72901 - protein, 487 aa, Neisseria meningitidis
MFKRSVIAMACIVALSACGGGGGSPDVKSADTPSKPAAPVVAEKETEVKEDAPQAGSQGQDVPSKQGSQDMAAVSAENTGNGGSATTDKPKNEDEGPQNDMPQNAADTDSLTPNHTPAPNMPTGDMGNQAPDSGESAQPANQPDMANAADGIQGDDPSVGENAGNTADQAANQAENNQVGGSQNPASSSNPNATNSGGDFGRINVANGIKLDGGSENVTLTHCKDKVCDRDFLDEEAPPKSEFEKLSDEEKINKYKKDEQRENFVGLVADRVEKNGTNKYVIIYKDKSASSSSARFRRSARSRRSLPAEMPLIPVNQADTLIVDGEAVSLTGHSGNIFAPEGNYRYLTYGAEKLSGGSYALSVQGEPAKGEMLAGTAVYNGEVLHFHMENGRPSPSGGRFAAKVDFGSKSVDGIIDSGDDLHMGTQKFKAVIDGNGFKGTWTENGGGDVSGRFYGPAGEEVAGKYSYRPTDAEKGGFGVFAGKKEQD

SEQ ID NO: 72902 - protein, 427 aa, Neisseria meningitidis
MFERSVIAMACIFALSACGGGGGGSPDVKSADTLSKPAAPVVAEKETEVKEDAPQAGSQGQGAPSTQGSQDMAAVSAENTGNGGAATTDKPKNEDEGPQNDMPQNSAESANQTGNNQPADSSDSAPASNPAPANGGSNFGRVDLANGVLIDGPSQNITLTHCKGDSCNGDNLLDEEAPSKSEFENLNESERIEKYKKDGKSDKFTNLVATAVQANGTNKYVIIYKDKSASSSSARFRRSARSRRSLPAEMPLIPVNQADTLIVDGEAVSLTGHSGNIFAPEGNYRYLTYGAEKLPGGSYALRVQGEPAKGEMFAGTAVYNGEVLHFHTENGRPYPTRGRFAAKVDFGSKSVDGIIDSGDDLHMGTQKFKAAIDGNGFKGTWTENGGGDVSGRFYGPAGEEVAGKYSYRPTDAEKGGFGVFAGKKEQD

SEQ ID NO: 72903 - protein, 471 aa, Neisseria meningitidis
MFKRSVIAMACIFALSACGGGGGGSPDVKSADTLSKPAAPVVSEKETEAKEDAPQAGSQGQGAPSAQGSQDMAAVSEENTGNGGAATADNPKNEDEGAQDDMPQKAADTDSLTPNHTPAPNMPAGNMENQPDMANTADGMQGDDPSVGENAGNMAAQGANQAGNNQAAGSSDSTPASNPATTNSGGDFGRTNVANGIKLDGPSQNITLTHCKDTVCGSDFLDEEAPSKSEFESLSDEKKIEKYKKDGEKFTNLVATEVQANGVNKYVIIYKDKSTSSARVRRSARSRRSLPAEMPLIPVNQADTLIVDGEAVILTEHPGNIFAPEGNYRYLTYGAEKLSGGSYALRVQGEPAKGEMLAGTAVYNGEVLHFHTENGRSYPTKGRFAAKVDFGSKSVDGIIDSGDDLHMGTQKFKAAINGNGFKGTWTENGGGDVSGKFYGPAGEEVAGKYSYRPTDAEKGGFGVFAGKKEQD

SEQ ID NO: 72904 - protein, 487 aa, Neisseria meningitidis
MFKRSVIAMACIFALSACGGGGGGSPDVKSADTLSKPAAPVVSEKETEAKEDAPQAGSQGQGAPSAQGSQDMAAVSEENTGNGGAATADNPKNEDEGAQDDMPQNAADTDSLTPNHTPASNMPAVNMENQAPDTGESAQPENQPDAANAGDGIQGDDPSAGGENAGNTAAQGTNQAENNQAAGSQNPASSTNPNATNGGGDFGRVDLANGIKLDSGSENVTLTHCKDTVCGSDFLDEEAPSKSEFESLSDEKKIEKYKKDGEKFTNLVATEVQANGVNKYVIIYKDKSASSSSARFRRSARLRRSLPAEMPLIPVNQADTLIVDGEAVSLTGHSGNIFAPEGNYRYLTYGAEKLSGGSYALRVQGEPAKGEMLAGTAVYNGEVLHFHTENGRSYPTKGRFAAKVDFGSKSVDGIIDSGDDLHMGTQKFKAAINGNGFKGTWTENGGGDVSGKFYGPAGEEVAGKYSYRPTDAEKGGFGVFAGKKEQD

SEQ ID NO: 72905 - protein, 425 aa, Neisseria meningitidis
MFKRSVIAMACIVALSACGGGGGGSPDVKSADTPSKPTAPVVAEKETEAKEDAPQAGSQGQGAPSTQGSQDMAAVSAENTGNGGAATTDKPKNEDEGSQNDMPQNAAESANQTGNNQPAGSSDSAPASNPAPANGGSNFGRVDLANGVLIDGPSQNITLTHCKGDSCDGDNLLDEEAPSKSEFDNLSESERMEKYKKDGKSDKFTGFVADKLQMKGTNQYIIFYKPKTTSSVRVRRSARSRRSLPAEMPLIPVNQADTLIVDGEAVSLTGHSGNIFAPEGNYRYLTYGAEKLSGGSYALSVQGEPAKGEMLAGTAVYNGEVLHFHTENGRPSPFRGRFAAKVDFGSKSVDGIIDSGDDLHMGKQKFKAAIDGNGFKGNWTENGGGDVSGRFYGPAGEEVAGKYSYRPTDAEKGGFGVFAGKKEQD

SEQ ID NO: 72906 - protein, 485 aa, Neisseria meningitidis
MFKRSVIAMACIFALSACGGGGGGSPDVKSADTLSKPAAPVVSEKETEAKEDAPQAGSQGQGAPSAQGSQDMAAVSEENTGNGGAATADNPKNEDEAQNDMPQNTAGTDSLTPNHTPASNMPAGNMENQAPDAGESEQPANQPDMANTADGMQGDDPSAGGENAGNTAAQGANQAENNQAAGSSDSTPASNPAHTNSGGNFGRVDLANGVLIDGPSQNITLTHCKDKVCSSELLDEEVLLKSEFEKLSNEEKIKQYKKDGRDKFTNLVATEVQANGVNKYVIIYKDKSASSAQFRRSARSRRSLPAEMPLIPVNQADTLIIDGEAVSLTGHSGNIFAPEGNYRYLTYGAEKLSGGSYALRVQGEPSKGEMLAGAAVYNGEVLHFHTENGRSYPTRGRFAAKVDFGSKSVDGIIDSGDDLHMGKQKFKAAIDGNGFKGTWTENGGGDVSGRFYGPAGEEVAGKYSYRPTDAEKGGFGVFAGKKEQD

SEQ ID NO: 72907 - protein, 488 aa, Neisseria meningitidis
MFKRSVIAMACIFALSACGGGGGGSPDVKSADTLSKPAAPVVSEKETEAKEDAPQAGSQGQGAPSAQGSQDMAAVSEENTGNGGAVTADNPKNEDEVAQNDMPQNAAGTDSSTPNHTPDPNMLAGNMENQATDAGESSQPANQPDMANAADGMQGDDPSAGGQNAGNTAAQGANQAGNNQAAGSSDPIPASNPAPANGGSNFGRVDLANGVLIDGPSQNITLTHCKGDSCSGNNFLDEEVQLKSEFEKLSDADKISNYKKDGKNDKFVGLVADSVQMKGINQYIIFYKPKPTSFARFKRSARSRRSLPAEMPLIPVNQADTLIVDGEAVSLTGHSGNIFAPEGNYRYLTYGAEKLPGGSYALRVQGEPAKGEMLAGAAVYNGEVLHFHTENGRPYPTRGRFAAKVDFGSKSVDGIIDSGDDLHMGTQKFKAAIDGNGFKGTWTENGSGDVSGKFYGPAGEEVAGKYSYRPTDAEKGGFGVFAGKKEQD

SEQ ID NO: 72908 - protein, 497 aa, Neisseria meningitidis
MFKRSVIAMACIVALSACGGGGGGSPDVKSADTLSKPAAPVVTEDVGEEVLPKEKKDEEAVSGAPQADTQDATAGKGGQDMAAVSAENTGNGGAATTDNPENKDEGPQNDMPQNAADTDSSTPNHTPAPNMPTRDMGNQAPDAGESAQPANQPDMANAADGMQGDDPSAGGENAGNTAAAESANQTGNNQSAGSSDSAPASNPAPANGGSDFGRVDLANGIKLDSGSENVTLTHCKDKVCDRDFLDEEAPPKSEFESLDDSGRINKYKKDGTSDKFTNLVATEVKANGTNKYVIIYKDKSTSSARVRRSARSRRSLPAEMPLIPVNQADTLIVDGEAVILTGHSGNIFAPEGNYRYLTYGAEKLSGGSYALSVQGEPAKGEMLAGTAVYNGEVLHFHTENGRSYPTKGRFAAKVDFGSKSVDGIIDSGDDLHMGTQKFKAVIDGNGFKGTWTENGGGDVSGRFYGPAGEEVAGKYSHRPTDAEKGGFGVFAGKKEQD

SEQ ID NO: 72909 - protein, 497 aa, Neisseria meningitidis
MFKRSVIAMACIVALSACGGGGGGSPDVKSADTLSKPAAPVVTEDVGEEVLPKEKKDEEAVSGAPQADTQDATAGKGGQDMAAVSAENTGNGGAATTDNPENKDEGPQNDMPQNAADTDSSTPNHTPAPNMPTRDMGNQAPDAGESAQPANQPDMANAADGMQGDDPSAGENAGNTADQAANQAENNQVGGSQNPASSTNPNATNGGSDFGRINVANGIKLDSGSENVTLTHCKDKVCDRDFLDEEAPPKSEFEKLSDEEKINKYKKDEQRENFVGLVADRVEKNGINKYVIIYKDKSASSSSARFRRSARSRRSLPAEMPLIPVNQADTLIVDGEAVSLTGHSGNIFAPEGNYRYLTYGAEKLSGGSYALSVQGEPAKGEMLAGTAVYNGEVLHFHMENGRPSLSGGRFAAKVDFGSKSVDGIIDSGDDLHMGTQKFKAVIDGNGFKGTWTENGGGDVSGRFYGPAGEEVAGKYSYRPTDAEKGGFGVFAGKKEQD

SEQ ID NO: 72910 - protein, 497 aa, Neisseria meningitidis
MFKRSVIAMACIVALSACGGGGGGSPDVKSADTLSKPAAPVVTEDVGEEVLPKEKKDEEAVSGAPQADTQDATAGKGGQDMAAVSAENTGNGGAATTDNPENKDEGPQNDMPQNAADTDSSTPNHTPAPNMPTRDMGNQAPDAGESAQPANQPDMANAADGMQGDDPSAGGENAGNTAAAESANQTGNNQSAGSSDSAPASNPAPANGGSDFGRVDLANGIKLDSGSENVTLTHCKDKVCDRDFLDEEAPPKSEFESLDDSGRINKYKKDGTSDKFTNLVATEVKANGTNKYVIIYKDKSTSSARVRRSARSRRSLPAEMPLIPVNQADTLIVDGEAVILTGHSGNIFAPEGNYRYLTYGAEKLSGGSYALSVQGEPAKGEMLAGTAVYNGEVLHFHTENGRPYPTRGRFAAKVDFGSKSVDGIIDSGDDLHMGTQKFKAAIDGNGFKGTWTENGGGDVSGRFYGPAGEEVAGKYSHRPTDAEKGGFGVFAGKKEQD

SEQ ID NO: 72911 - protein, 427 aa, Neisseria meningitidis
MFERSVIAMACIFALSACGGGGGGSPDVKSADTLSKPAAPVVAEKETEVKEDAPQAGSQGQGAPSTQGSQDMAAVSAENTGNGGAATTDKPKNEDEGPQNDMPQNSAESANQTGNNQPADSSDSAPASNPAPANGGSNFGRVDLANGVLIDGPSQNITLTHCKGDSCNGDNLLDEEAPSKSEFENLNESERIEKYKKDGKSDKFTNLVATAVQANGTNKYVIIYKDKSASSSSARFRRSARSRRSLPAEMPLIPVNQADTLIVDGEAVSLTGHSGNIFAPEGNYRYLTYGAEKLPGGSYALRVQGEPAKGEMLAGTAVYNGEVLHFHTENGRPYPTRGRFAAKVDFGSKSVDGIIDSGDDLHMGTQKFKAAIDGNGFKGTWTENGGGDVSGRFYGPAGEEVAGKYSYRPTDAEKGGFSVFAIKNEQD

SEQ ID NO: 72912 - protein, 427 aa, Neisseria meningitidis
MFERSVIAMACIFALSACGGGGGGSPDVKSADTLSKPAAPVVAEKETEVKEDAPQAGSQGQGAPSTQGSQDMAAVSAENTGNGGAATTDKPKNEDEGPQNDMPQNSAESANQTGNNQPADSSDSAPASNPAPANGGSNFGRVDLANGVLIDGPSQNITLTHCKGDSCNGDNLLDEEAPSKSEFENLNESERIEKYKKDGKSDKFTNLVATAVQANGTNKYVIIYKDKSASSSSARFRRSARSRRSLPAEMPLIPVNQADTLIVDGEAVSLTGHSGNIFAPEGNYRYLTYGAEKLSGGSYALSVQGEPAKGEMLAGTAVYNGEVLHFHMENGRPSPSGGRFAAKVDFGSKSVDGIIDSGDDLHMGTQKFKAVIDGNGFKGTWTENGGGDVSGRFYGPAGEEVAGKYSYRPTDAEKGGFGVFAGKKEQD

SEQ ID NO: 72913 - protein, 486 aa, Neisseria meningitidis
MFKRSVIAMACIVALSACGGGGGGSPDVKSADTLSKPAAPVVTEDVGEEVLPKEKKDEEAVSGAPQADTQDATAGKGGQDMAAVSAENTGNGGAATTDNPENKDEGPQNDMPQNAADTDSSTPNHTPAPNMPTRDMGNQAPDSGESAQPANQPDMANAADGIQGDDPSVGENAGDQAANQAENNQVGGSQNPAPSTNPSTTNGGDFGRVDLANGIKLDGGSENVTLTHCKDKVCGSDFLDEEAPPKSEFESLSDEERIKKYKKNGGKFTGLVATRVENNGLNQYTIIYQAQPTRSARSRRSRRSLPAEIPLIPVNQADTLIVDGEAVSLTGHSGNIFAPEGNYRYLTYGAEKLSGGSYALSVQGEPAKGEMLAGTAVYNGEVLHFHTENGRPYPSRGRFAAKVDFGSKSVDGIIDSGDDLHMGTQKFKAAIDGNGFKGTWTENGSGDVSGKFYGPAGEEVAGKYSYRPTDAEKGGFGVFAGKKEQD

SEQ ID NO: 72914 - protein, 497 aa, Neisseria meningitidis
MFKRSVIAMACIVALSACGGGGGGSPDVKSADTLSKPAAPVVTEDVGEEVLPKEKKDEEAVSGAPQADTQDATAGKGGQDMAAVSAKNTGNGGAATTDNPENKDEGPQNDMPQNAADTDSSTPNHTPAPNMPTRDMGNQAPDAGESAQPANQPDMANAADGMQGDDPSAGENAGNTADQAANQAENNQVGGSQNPASSTNPNATNGGSDFGRINVANGIKLDSGSENVTLTHCKDKVCDRDFLDEEAPPKSEFEKLSDEEKINKYKKDEQRENFVGLVADRVEKNGTNKYVIIYKDKSASSSSARFRRSARSRRSLPAEMPLIPVNQADTLIVDGEAVSLTGHSGNIFAPEGNYRYLTYGAEKLSGGSYALSVQGEPAKGEMLAGTAVYNGEVLHFHMENGRPSPSGGRFAAKVDFGSKSVDGIIDSGDDLHMGTQKFKAVIDGNGFKGTWTENGGGDVSGRFYGPAGEEVAGKYSYRPTDAEKGGFGVFAGKKEQD

SEQ ID NO: 72915 - protein, 482 aa, Neisseria meningitidis
MFKRSVIAMACIFALSACGGGGGGSPDVKSADTLSKPAAPVVSEKETEAKEDAPQAGSQGQGAPSAQGGQDMAAVSEENTGNGGAAATDKPKNEDEGAQNDMPQNAADTDSLTPNHTPASNMPAGNMENQAPDAGESEQPANQPDMANAADGMQGDDPSAGGENAGNTADQAANQAENNQAAGSQNPAPSSNSNAANGGGDFGRTNVGNSVVIDGPSQNITLTHCKGDSCNDDNLLDEEAPSKSEFEKLSESERMEKYKKDGKGKFVGLVATTVKMEGTNKYIIFYTDNPPTRSARSRRSLPAEMPLIPVNQADTLIVDGEAVSLTGHSGNIFAPEGNYRYLTYGAEKLSGGSYAFRVQGEPAKGEMLAGTAVYNGEVLHFHMENGRPYPTRGRFAAKVDFGSKSVDGIIDSGDDLHMGKQKFKAAIDGNGFKGTWTENGGGDVSGRFYGPAGEEVAGKYSYRPTDAEKGGFGVFAGKKEQD

SEQ ID NO: 72916 - protein, 488 aa, Neisseria meningitidis
MFKRSVIAMACIFALSACGGGGGGSPDVKSADTLSKPAAPVVSEKETEAKEDAPQAGSQGQGAPSAQGSQDMAAVSEENTGNGGAVTADNPKNEDEVAQNDMPQNAAGTDSSTPNHTPDPNMLAGNMENQATDAGESSQPANQPDMANAADGMQGDDPSAGGQNAGNTAAQGANQAGNNQAAGSSDPIPASNPAPANGGSNFGRVDLANGVLIDGPSQNITLTHCKGDSCSGNNFLDEEVQLKSEFEKLSDADKISNYKKDGKNDKFVGLVADSVQMKGINQYIIFYKPKPTSFARFRRSARSRRSLPAEMPLIPVNQADTLIVDGEAVSLTGHSGNIFAPEGNYRYLTYGAEKLPGGSYALRVQGEPAKGEMLAGTAVYNGEVLHFHTENGRPYPTRGRFAAKVDFGSKSVDGIIDSGDDLHMGTQKFKAAIDGNGFKGTWTENGGGDVSGRFYGPAGEEVAGKYSYRPTDAEKGGFGVFAGKKEQD

SEQ ID NO: 72917 - protein, 497 aa, Neisseria meningitidis
MFKRSVIAMACIVALSACGGGGGGSPDVKSADTLSKPAAPVVTEDVGEEVLPKEKKDEEAVSGAPQADTQDATAGKGGQDMAAVSAENTGNGGAATTDNPENKDEGPQNDMPQNAADTDSSTPNHTPAPNMPTRDMGNQAPDAGESAQPANQPDMANAADGMQGDDPSAGENAGNTADQAANQAENNQVGGSQNPASSTNPNATNGGSDFGRINVANGIKLDSGSENVTLTHCKDKVCDRDFLDEEAPPKSEFEKLSDEEKINKYKKDEQRENFVGLVADRVEKNGTNKYVIIYKDKSASSSSARFRRSARSRRSLPAEMPLIPVNQADTLIVDGEAVSLTGHSGNIFAPEGNYRYLTYGAEKLSGGSYALSVQGELAKGEMLAGTAVYNGEVLHFHMENGRPSPSGGRFAAKVDFGSKSVDGIIDSGDDLHMGTQKFKAVIDGNGFKGTWTENGGGDVSGRFYGPAGEEVAGKYSYRPTDAEKGGFGVFAGKKEQD

SEQ ID NO: 72918 - protein, 491 aa, Neisseria meningitidis
MFKRSVIAMACIFALSACGGGGGGSPDVKSADTLSKPAAPVVSEKETEAKEDAPQAGSQGQGAPSTQGSQDMAAVSAENTGNGGAATTDTPKNEDEGAQDDMPQKAAGTDSLTPNHTPAPNMPAGDMGNQAPDNGESAQPANQPDAANAGDGIQGDDPSAGENAGNTAAQGTNQAENNQTAGSQNPASSTNPSATNSGGDFGRTNVGNSVVIDGPSQNITLTHCKGDSCSGNNFLDEEVQLKSEFEKLSDADKISNYKKDGKNDGKNDKFVGLVADSVQMKGINQYIIFYKPKPTSFARFRRSARSRRSLPAEMPLIPVNQADTLIVDGEAVSLTGHSGNIFAPEGNYRYLTYGAEKLPGGSYALRVQGEPSKGEMLAGTAVYNGEVLHFHTENGRPSPSRGRFAAKVDFGSKSVDGIIDSGDGLHMGTQKFKAAIDGNGFKGTWTENGGGDVSGKFYGPAGEEVAGKYSYRPTDAEKGGFGVFAGKKEQD

SEQ ID NO: 72919 - protein, 425 aa, Neisseria meningitidis
MFERSVIAMACIFALSACGGGGGGSPDVKSADTLSKPAAPVVAEKETEVKEDAPQAGSQGQGAPSTQGSQDMAAVSAENTGNGGAATTDKPKNEDEGPQNDMLQNSAESANQTGNNQPADSSDSAPASNPAPANGGSNFGRVDLANGVLIDGPSQNITLTHCKGDSCNGDNLLDEEAPSKSEFENLNESERIEKYKKDGKSDKFTNLVATEVKANGTNKYVIIYKDKSTSSARVRRSARSRRSLPAEMPLIPVNQADTLIVDGEAVSLTGHSGNIFAPEGNYRYLTYGAEKLSGGSYALSVQGEPAKGEMLAGTAVYNGEVLHFHTENGRPYPSRGRFAAKVDFGSKSVDGIIDSGDDLHMGTQKFKAAIDGNGFKGTWTENGSGDVSGRFYGPAGEEVAGKYSYRPTDAEKGGFGVFAGKKEQD

SEQ ID NO: 72920 - protein, 497 aa, Neisseria meningitidis
MFKRSVIAMACIVALSACGGGGGGSPDVKSADTLSKPAAPVVTEDVGEEVLPKEKKDEEAVSGAPQADTQDATAGKGGQDMAAVSAENTGNGGAATTDNPENKDEGPQNDMPQNAADTDSSTPNHTPAPNMPTRDMGNQAPDAGESAQPANQPDMANAADGMQGDDPSAGENAGNTADQAANQAENNQVGGSQNPASSTNPNATNGGSDFGRINVANGIKLDSGSENVTLTHCKDKVCDRDFLDEEAPPKSEFEKLSDEEKINKYKKDEQRENFVGLVADRVEKNGTNKYVIIYKDKSASSSSARFRRSARSRRSLPAEMPLIPVNQADTLIVDGEAVSLTGHSGNIFAPEGNYRYLTYGAEKLSGGSYALRVQGEPAKGEMLAGTAVYNGEVLHFHMENGRPSPSGGRFAAKVDFGSKSVDGIIDSGDDLHMGTQKFKAVIDGNGFKGTWTENGGGDVSGRFYGPAGEEVAGKYSYRPTDAEKGGFGVFAGKKEQD

SEQ ID NO: 72921 - protein, 497 aa, Neisseria meningitidis
MFKRSVIAMACIVALSACGGGGGGSPDVKSADTLSKPAAPVVTEDVGEEVLPKEKKDEEAVSGAPQADTQDATAGKGGQDMAAVSAENTGNGGAATTDNPENKDEGPQNDMPQNAADTDSSTPNHTPAPNMPTRDMGNQAPDAGESAQPANQPDMANAADGMQGDDPSAGGENAGNTAAAESANQTGNNQPAGSSDSAPASNPAPANGGSDFGRVDLANGIKLDSGSENVTLTHCKDKVCDRDFLDEEAPPKSEFESLDDSGRINKYKKDGTSDKFTNLVATEVKANGTNKYVIIYKDKSTSSARVRRSARSRRSLPAEMPLIPVNQADTLIVDGEAVSLTGHSGNIFAPEGNYRYLTYGAEKLSGGSYALSVQGEPAKGEMLAGTAVYNGEVLHFHTENGRPYPSRGRFAAKVDFGSKSVDGIIDSGDDLHMGTQKFKAAIDGNGFKGTWTENGSGDVSGRFYGPAGEEVAGKYSYRPTDAEKGGFGVFAGKKEQD

SEQ ID NO: 72922 - protein, 497 aa, Neisseria meningitidis
MFKRSVIAMACIVALSACGGGGGGSPDVKSADTLSKPAAPVVTEDVGEEVLPKEKKDEEAVSGAPQADTQDATAGKGGQDMAAVSAENTGNGGAATTDNPENKDEGPQNDMPQNAADTDSSTPNHTPAPNMPTRDMGNQAPDAGESAQPANQPDMANAADGMQGDDPSAGENAGNTADQAANQAENNQVGGSQNPASSTNPNATNGGSDFGRINVANGIKLDSGSENVTLTHCKDKVCDRDFLDEEAPPKSEFEKLSDEEKINKYKKDEQRENFVGLVADRVEKNGTNKYVIIYKDKSASSSSARFRRSARSRRSLPAEMPLIPVNQADTLIVDGEAVSLTGHSGNIFAPEGNYRYLTYGAEKLSGGSYALSVQGEPAKGEMLAGTAVYNGEVLHFHTENGRSYPTKGRFAAKVDFGSKSVDGIIDSGDDLHMGKQKFKAAIDGNGFKGTWTENGGGDVSGRFYGPAGEEVAGKYSYRPTDAEKGGFGVFAGKKEQD

SEQ ID NO: 72923 - protein, 427 aa, Neisseria meningitidis
MFERSVIAMACIFALSACGGGGGGSPDVKSADTLSKPAAPVVAEKETEVKEDAPQAGSQGQGAPSTQGSQDMEAVSAENTGNGGAATTDKPKNEDEGPQNDMLQNSAESANQTGNNQPADSSDSAPASNPAPANGGSNFGRVDLANGVLIDGPSQNITLTHCKGDSCNGDNLLDEEAPSKSEFENLNESERIEKYKKDGKSDKFTNLVATAVQANGTNKYVIIYKDKSASSSFARFRRSARSRRSLPAEMPLIPVNQADTLIVDGEAVSLTGHSGNIFAPEGNYRYLTYGAEKLPGGSYALRVQGEPAKGEMLAGTAVYNGEVLHFHTENGRPYPTRGRFAAKVDFGSKSVDGIIDSGDDLHMGTQKFKAAIDGNGFKGTWTENGGGDVSGRFYGPAGEEVAGKYSYRPTDAEKGGFGVFAGKKEQD

SEQ ID NO: 72924 - protein, 499 aa, Neisseria meningitidis
MFKRSVIAMACIVALSACGGGGGGSPDVKSADTLSKPAAPVVTEDVGEEVLPKEKKDEEAVSGAPQADTQDATAGKGGQDMAAVSAENTGNGGAATTDNPENKDEGPQNDMPQNAADTDSSTPNHTPAPNMPTRDMGNQAPDAGESAQPANQPDMANAADGMQGDDPSAGGENAGNTAAAESANQTGNNQPAGSSDSAPASNPAPANGGSDFGRVDLANGIKLDSGSENVTLTHCKDKVCDRDFLDEEAPPKSEFESLDDSGRINKYKKDGTSDKFTNLVATEVKANGTNKYVIIYKDKSASSSSARFRRSARSRRSLPAEMPLIPVNQADTLIVDGEAVSLTGHSGNIFAPEGNYRYLTYGAEKLSGGSYALSVQGEPAKGEMLAGTAVYNGEVLHFHMENGRPSPSGGRFAAKVDFGSKSVDGIIDSGDDLHMGTQKFKAVIDGNGFKGTWTENGGGDVSGRFYGPAGEEVAGKYSYRPTDAEKGGFGVFAGKKEQD

SEQ ID NO: 72925 - protein, 486 aa, Neisseria meningitidis
MFKRSVIAMACIFALSACGGGGGGSPDVKSADTLSKPAAPVVAEDVEEEVLPKEKKDEEAVGGAPQADTQDTTAGKGGQDMAAVSEENTGNGGAATADNPKNEDEAQNDMPQNTAGTDSLTPNHTPASNMPAGNMENQAPDAGESEQPANQPDMANTADGMQGDDPSAGGENAGDQAANQAENNQVGGSQNPAPSTNPSTTNGGDFGRVDLANGIKLDGGSENVTLTHCKDKVCGSDFLDEEAPPKSEFESLSDEERIKKYKKNGGKFTGLVATRVENNGLNQYTIIYQAQPARSARSRRLRRSLPAEMPLIPVNQADTLIVDGEAVSLTGHSGNIFAPEGNYRYLTYGAEKLSGGSYALRVQGEPAKGEMLAGTAVYNGEVLHFHMENGRSYPSRGRFAAKVDFGSKSVDGIIDSGDDLHMGTQKFKAAIDGNGFKGTWTENGGGDVSGRFYGPAGEEVAGKYSYRPKDAEKGGFGVFAGKKEQD

SEQ ID NO: 72926 - protein, 427 aa, Neisseria meningitidis
MFERSVIAMACIFALSACGGGGGGSPDVKSADTLSKPAAPVVAEKETEVKEDAPQAGSQGQGAPSTQGSQDMAAVSAENTGNGGAATTDKPKNEDEGPQNDMLQNSAESANQTGNNQPADSSDSAPASNPAPANGGSNFGRVDLANGVLIDGPSQNITLTHCKGDSCNGDNLLDEEAPSKSEFENLNESERIEKYKKDGKSDKFTNLVATAVQANGTNKYVIIYKDKSASSSFARFRRSARSRRSLPAEMPLIPVNQADTLIVDGEAVSLTGHSGNIFAPEGNYRYLTYGAEKLPGGSYALRVQGEPAKGEMLAGTAVYNGEVLHFHTENGRPYPTRGRFAAKVDFGSKSVDGIIDSGDDLHMGTQKFKAAIDGNGFKGTWTENGGGDVSGRFYGPAGEEVAGKYSYRPTDAEKGGFGVFAGKKEKD

SEQ ID NO: 72927 - protein, 427 aa, Neisseria meningitidis
MFERSVIAMACIFALSACGGGGGGSPDVKSADTLSKPAAPVVAEKETEVKEDAPQAGSQGQGAPSTQGSQDMAAVSAENTGNGGAATTDKPKNEDEGPQNDMPQNSAESANQTGNNQPADSSDSAPASNPAPANGGSNFGRVDLANGVLIDGPSQNITLTHCKGDSCNGDNLLDEEAPSKSEFENLNESERIEKYKKDGKSDKFTNLVATAVQANGTNKYVIIYKDKSASSSSARFRRSARSRRSLPAEMPLIPVNQADTLIVDGEAVSLTGHSGNIFAPEGNYRYLTYGAEKLPGGSYALRVQGEPAKGEMLAGTAVYNGEVLHFHTENGRPSPSGGRFAAKVDFGSKSVDGIIDSGDDLHMGTQKFKAVIDGNGFKGTWTENGGGDVSGRFYGPAGEEVAGKYSYRPTDAEKGGFGVFAGKKEQD

SEQ ID NO: 72928 - protein, 426 aa, Neisseria meningitidis
MFKRSVIAMACIFALSACGGGGGGSPDVKSADTPSKPAAPVVAEKETDAKEDAPQAGSQGQGAPSTQGSQDMAAVSAENTGNGGAATTDKPKNEDEGAQNDMPQNAAESANQTGNNQPAGSSDSAPASNPAPANGGSNFGRVDLANGIKLDSGSENVTLTHCKDKVCGSDFLDEEAPSKSEFESLDDSGRINKYKKDGKSDKFTNLVATAVQANGLNKYVIIYKDKSASSSSARFRRSARSRRSLPAEMPLIPVNQADTLIVDGEAVSLTGHSGNIFAPEGNYRYLTYGAEKLSGGSYALSVQGEPAKGEMLAGAAVYNGEVLHFHMENGRPSSFRGRFAAKVDFGSKSVDGIIDSGDDLHMGTQKFKAVIDGNGFKGTWTENGGGDVSGRFYGPTGEEVAGKYSYRPTDAEKGGFGVFAGKKEQD

SEQ ID NO: 72929 - protein, 497 aa, Neisseria meningitidis
  misc_feature 35: 'Xaa' is any amino acid
MFKRSVIAMACIVALSACGGGGGGSPDVKSADTLXKPAAPVVTEDVGEEVLPKEKKDEEAVSGAPQADTQDATAGKGGQDMAAVSAENTGNGGAATTDNPENKDEGPQNDMPQNAADTDSSTPNHTPAPNMPTRDMGNQAPDAGESAQPANQPDMANAADGMQGDDPSAGENAGNTADQAANQAENNQVGGSQNPASSTNPNATNGGSDFGRINVANGIKLDSGSENVTLTHCKDKVCDRDFLDEEAPPKSEFEKLSDEEKINKYKKDEQRENFVGLVADRVEKNGTNKYVIIYKDKSASSSSARFRRSARSRRSLPAEMPLIPVNQADTLIVDGEAVSLTGHSGNIFAPEGNYRYLTYGAEKLSGGSYALSVQGEPAKGEMLAGTAVYNGEVLHFHMENGRPSPSGGRFAAKVDFGSKSVDGIIDSGDDLHMGTQKFKAVIDGNGFKGTWTENGGGDVSGRFYGPAGEEVAGKYSYRPTDAEKGGFGVFAGKKEQD

SEQ ID NO: 72930 - protein, 426 aa, Neisseria meningitidis
MFERSVIAMACIFALSACGGGGGGSPDVKSADTPSKPAAPVVAEKETEVKEDAPQAGSQGQGAPSTQGSQDMAAVSAENTGNGGAATTDKPKNEDEGPQNDMPQNAGNTAAQGTNQAENNQVGGSQNPAPSSNPNATNGGNFGRVDLANGVLIDGPSQNITLTHCKSDSCNGDNLLSEEAPSKSEFEQLSDEDKIKKYKKDGEKFTGLVADRLQMKGTNQYIIFYKPKTTSSARFRRSARSRRSLPAEMPLIPVNQADTLIVDGEAVSLTGHSGNIFAPEGNYRYLTYGAEKLSGGSYALSVQGEPAKGEMLAGTAVYNGEVLHFHTENGRSYPTKGRFAAKVDFGSKSVDGIIDSGDDLHMGKQKFKAAIDGNGFKGTWTENGGGDVSGRFYGPAGEEVAGKYSYRPTDAEKGGFGVFAGKKKQD

SEQ ID NO: 72931 - protein, 425 aa, Neisseria meningitidis
MFERSVIAMACIFALSACGGGGGGSPDVKSADTLSKPAAPVVAEKETEVKEDAPQAGSQGQGAPSTQGSQDMAAVSAENTGNGGAATTDKPKNEDEGPQNDMPQNSAESANQTGNNQPADSSDSAPASNPAPANGGSNFGRVDLANGVLIDGPSQNITLTHCKGDSCNGDNLLDEEAPSKSEFENLNESERIEKYKKDGKSDKFTNLVATAVQANGTNKYVIIYKDKSTSSARVRRSARSRRSLPAEMPLIPVNQADTLIVDGEAVSLTGHSGNIFAPEGNYRYLTYGAEKLSGGSYALSVQGEPAKGEMLAGTAVYNGEVLHFHTENGRSYPTKGRFAAKVDFGSKSVDGIIDSGDDLHMGTQKFKAAIDGNGFKGTWTENGGGDVSGRFYGPAGEEVAGKYSYRPTDAEKGGFGVFAGKKEQD

SEQ ID NO: 72932 - protein, 425 aa, Neisseria meningitidis
MFKRSVIAMACIFALSACGGGGGGSPDVKSADTPSKPAAPVVAEKETDAKEDAPQAGSQGQGAPSAQGGQDMAAVSAENTGNGGAETADNPENKDEGTQNDMPQNAAESANQTGNNQSAGSSDSAPASNPAPANGGGDFGRTNVGNSVVIDGPSQNITLTHCRGDSCDGDNLLDEEAPSKSEFDNLSESERMEKYKKDGKSDKFTGFVADKLQMKGTNQYIIFYKPKTTSSARFRRSARSRRSLPAEMPLIPVNQADTLIVDGEAVSLTGHSGNIFAPEGNYRYLTYGAEKLSGGSYALRVQGEPAKGEMLAGTAVYNGEVLHFHTENGRPYPSRGRFAAKVDFGSKSVDGIIDSGDDLHMGTQKFKAAIDGNGFKGTWTENGGGDVSGRFYGPAGEEVAGKYSYRPTDAEKGGFGVFAGKKEQD

SEQ ID NO: 72933 - protein, 426 aa, Neisseria meningitidis
MFERSVIAMACIFALSACGGGGGGSPDVKSADTPSKPAAPVVAEKETEVKEDAPQAGSQGQGAPSTQGSQDMAAVSAENTGNGGAATTDKPKNEDEGPQNDMPQNAGNTAAQGTNQVENNQVGGSQNPAPSSNPNATNGGNFGRVDLANGVLIDGPSQNITLTHCKSDSCNGDNLLSEEAPSKSEFEQLSDEDKIKKYKKDGEKFTGLVADRLQMKGTNQYIIFYKPKTTSSARFRRSARSRRSLPAEMPLIPVNQADTLIVDGEAVSLTGHSGNIFAPEGNYRYLTYGAEKLSGGSYALSVQGEPAKGEMLAGTAVYNGEVLHFHTENGRSYPTKGRFAAKVDFGSKSVDGIIDSGDDLHMGKQKFKAAIDGNGFKGTWTENGGGDVSGRFYGPAGEEVAGKYSYRPTDAEKGGFGVFAGKKEQD

SEQ ID NO: 72934 - protein, 426 aa, Neisseria meningitidis
MFERSVIAMACIFALSACGGGGGGSPDVKSADTPSKPAAPVVAEKETEVKEDAPQAGSQGQGAPSTQGSQDMAAVSAENTGNGGAATTDKPKNEDEGPQNDMPQNAGNTAAQGTNQAENNQVGGSQNPAPSSNPNATNGGNFGRVDLANGVLIDGPSQNITLTHCKSDSCNGDNLLSEEAPSKSEFEQLSDEDKIKKYKKDGEKFTGLVADRLQMKGTNQYIIFYKPKTTSSARFRRSARSRRSLPAEMPLIPVNQADTLIVDGEAVSLTGHSGNIFAPEGNYRYLTYGAEKLSGGSYALSVQGEPAKGEMLAGTAVYNGEVLHFHTENGRSYPTKGRFAAKVDFGSKSVDGIIDSGDDLHMGKQKFKAAIDGNGFKGTWTENGGGDVSGRFYGPAGEEVAGKYSYRPTDAEKGGFGVFASKKEQD

SEQ ID NO: 72935 - protein, 770 aa, Neisseria meningitidis
MFERSVIAMACIFALSACGGGGGGSPDVKSADTPSKPAAPVVAEKETEVKEDAPQAGSQGQGAPSTQGSQDMAAVSAENTGNGGAATTDKPKNEDEGPQNDMPQNAGNTAAQGTNQAENNQVGGSQNPAPSSNPNATNGGNFGRVDLANGVLIDGPSQNITLTHLDSDFKCNTSVLVVGTDSRIKHLAFRSQVFFLVGGSTHLEPCVSPDHCYGNRFVWGSIAGVRWCSHSALSPKNGKGDKNKSPLSMLWLFWCVGRTLCRYPWWWAPWLYVPLMPQLPGQCLPLSYPICKWCNGRVRPRSIMRFSGLCRQWCRLPNRRYGISGRRRVGFLCRHGWGLCLWSMCCRSVCGRVCCIFDVATTCCRCFCLGEGSGKWCCGGASGGVCTGRRILVRDVCGGGCRCAESAANRAYRVVAYAVSGFAAGLFRRCIAALGCGAVFRGWCFCGGSAVWRFRRCSGGTGIGCGIVRLGSVACSSWQSFLQERPYATAYWPFSVRESCTSNANPPHCKSDSCNGDNLLSEEAPSKSEFEQLSDEDKIKKYKKDGEKFTGLVADRLQMKGTNQYIIFYKPKTTSSARFRRSARSRRSLPAEMPLIPVNQADTLIVDGEAVSLTGHSGNIFAPEGNYRYLTYGAEKLSGGSYALSVQGEPAKGEMLAGTAVYNGEVLHFHTENGRSYPTKGRFAAKVDFGSKSVDGIIDSGDDLHMGKQKFKAAIDGNGFKGTWTENSGGDVSGKFYGPAGEEVAGKYSYRPTDAEKGGFGVFAGKKEQD

SEQ ID NO: 72936 - protein, 426 aa, Neisseria meningitidis
  misc_feature 246: 'Xaa' is any amino acid
MFERSVIAMACIFALSACGGGGGGSPDVKSADTPSKPAAPVVAEKETEVKEDAPQAGSQGQGAPSTQGSQDMAAVSAENTGNGGAATTDKPKNEDEGPQNDMPQNAGNTAAQGTNQAENNQVGGSQNPAPSSNPNATNGGNFGRVDLANGVLIDGPSQNITLTHCKSDSCNGDNLLSEEAPSKSEFEQLSDEDKIKKYKKDGEKFTGLVADRLQMKGTNQYIIFYKPKTTSSARFRRSARSRRSLXAEMPLIPVNQADTLIVDGEAVSLTGHSGNIFAPEGNYRYLTYGAEKLSGGSYALSVQGEPAKGEMLAGTAVYNGEVLHFHTENGRSYPTKGRFAAKVDFGSKSVDGIIDSGDDLHMGKQKFKAAIDGNGFKGTWTENGGGDVSGRFYGPAGEEVAGKYSYRPTDAEKGGFGVFAGKKEQD

SEQ ID NO: 72937 - protein, 492 aa, Neisseria meningitidis
MFKRSVIAMACIFALSACGGGGGGSPDVKSADTLSKPAAPVVSEKETEAKEDAPQAGSQGQGAPSAQGGQDMAAVSEENTGNGGAAATDKPKNEDEGAQNDMPQNAADTDSLTPNHTPASNMPAGNMENQAPDAGESEQPANQPDMANTADGMQGDDPSAGGENAGNTAAQGTNQAENNQTAGSQNPASSTNPSATNSGGDFGRTNVGNSVVIDGPSQNITLTHCKGDSCSGNNFLDEEVQLKSEFEKLSDADKISNYKKDGKNDGKNDKFVGLVADSVQMKGINQYIIFYKPKPTSFARFRRSARSRRSLPAEMPLIPVNQADTLIVDGEAVSLTGHSGNIFAPEGNYRYLTYGAEKLLGGSYALRVQGEPSKGEMLAGTAVYNGEVLHFHTENGRPSPSRGRFAAKVDFGSKSVDGIIDSGDGLHMGTQKFKAAIDGNGFKGTWTENGGGDVSGKFYGPAGEEVAGKYSYRPTDAEKGGFGVFAGKKEQD

SEQ ID NO: 72938 - protein, 482 aa, Neisseria meningitidis
MFKRSVIAMACIFALSACGGGGGGSPDVKSADTLSKPAAPVVSEKETEAKEDAPQAGSQGQGAPSAQGGQDMAAVSEENTGNGGAATADNPKNEDEAQNDMPQNTAGTDSLTPNHTPASNMPAGNMENQAPDAGESAQPENKPDMANAADGIQGDDPSADGENAGNTAAQGTNSSRKQSKPPVLKILPLQPILTPRMAAANFGRTNVGNSVVIDGPSQNITLTHCKGDPCNGDNLLDEEAPSKSEFEKLNESERIEKYKKDGKDKFVGLVATTVKMEGINKYIIFYTDKPPTRSARSRRSLPAEMPLIPVNQADTLIVDGEAVSLTGHSGNIFAPEGNYRYLTYGAEKLSGGSYALSVQGEPAKGEMLAGTAVYNGEVLHFHTENGRPYPTRGRFAAKVDFGSKSVDGIIDSGDDLHMGTQKFKAAIDGNGFKGTWTENGGGDVSGRFYGPVGEEVAGKYSYRPTDAEKGGFGVFAGKKEQD

SEQ ID NO: 72939 - protein, 497 aa, Neisseria meningitidis
MFKRSVIAMACIVALSACGGGGGGSPDVKSADTLSKPAAPVVTEDVGEEVLPKEKKDEEAVSGAPQADTQDATAGKGGQDMAAVSAENTGNGGAATTDNPENKDEGPQNDMPQNAAHTDSSTPNHTPAPNMPTRDMGNQAPDAGESAQPANQPDMANAADGMQGDDPSAGGENAGNTAAAESANQTGNNQPAGSSDSAPASNPAPANGGSDFGRVDLANGIKLDSGSENVTLTHCKDKVCDRDFLDEEAPPKSEFESLDDSGRINKYKKDGTSDKFTNLVATEVKANGTNKYVIIYKDKSTSSARVRRSARSRRSLPAEMPLIPVNQADTLIVDGEAVILTGHSGNIFAPEGNYRYLTYGAEKLSGGSYALSVQGEPAKGEMLAGTAVYNGEVLHFHTENGRSYPTKGRFAAKVDFGSKSVDGIIDSGDDLHMGTQKFKAVIDGNGFKGTWTENGGGDVSGRFYGPAGEEVAGKYSHRPTDAEKGGFGVFAGKKEQD

SEQ ID NO: 72940 - protein, 425 aa, Neisseria meningitidis
MFERSVIAMACITLSACGGGGGGSPDVKSADTPSKPAAPVVAEKETEVKEDAPQAGSQGQGAPSTQGSQDMAAVSAENTGNGGAATTDKPKNEDEGPQNDMPQNAGNTAAQGTNQAENNQVGGSQNPAPSSNPNATNGGNFGRVDLANGVLIDGPSQNITLTHCKSDSCNGDNLLSEEAPSKSEFEQLSDEDKIKKYKKDGEKFTGLVADRLQMKGTNQYIIFYKPKTTSSARFRRSARSRRSLPAEMPLIPVNQADTLIVDGEAVSLTGHSGNIFAPEGNYRYLTYGAEKLSGGSYALSVQGEPAKGEMLAGTAVYNGEVLHFHTENGRSYPTKGRFAAKVDFGSKSVDGIIDSGDDLHMGKQKFKAAIDGNGFKGTWTENGGGDVSGRFYGPAGEEVAGKYSYRPTDAEKGGFGVFAGKKDQD

SEQ ID NO: 72941 - protein, 427 aa, Neisseria meningitidis
MFERSVIAMACIFALSACGGGGGGSPDVKSADTLSKPAAPVVAEKETEVKEDAPQAGSQGQGAPSTQGSQDMAAVSAENTGNGGAATTDKPKNEDEGPQNDMPQNSAESANQTGNNQPADSSDSAPASNPAPANGGSNFGRVDLANGVLIDGPSQNITLTHCKGDSCNGDNLLDEEAPSKSEFENLNESERIEKYKKDGKSDKFTNLVATAVQANGTNKYVIIYKDKSASSSSARFRRSARSRRSLPAEMPLIPVNQADTLIVDGEAVSLTGHSGNIFAPEGNYRYLTYGAEKLPGGSYALRVQGEPAKGEMLAGTAVYNGEVLHFHMENGRPYPTRGRFAAKVDFGSKSVDGIIDSGDDLHMGTQKFKAAIDGNGFKGTWTENGGGDVSGRFYGPAGEEVAGKYSYRPTDAEKGGFGVFAGKKEQD

SEQ ID NO: 72942 - protein, 427 aa, Neisseria meningitidis
MFERSVIAMACIFALSACGGGGGGSPDVKSADTLSKPAAPVVAEKETEVKEDAPQAGSQGQGAPSTQGSQDMAAVSAENTGNGGAATTDKPKNEDEGPQNDMPQNSAESANQTGNNQPADSSDSAPASNPAPANGGSNFGRVDLANGVLIDGPSQNITLTHCKGDSCNGDNLLDEEAPSKSEFENLNESERIEKYKKDGKSDKFTNLVATAVQANGTNKYVIIYKDKSASSSSARFRRSARSRRLLPAEMPLIPVNQADTLIVDGEAVSLTGHSGNIFAPEGNYRYLTYGAEKLPGGSYALRVQGEPAKGEMLAGTAVYNGEVLHFHTENGRPYPTRGRFAAKVDFGSKSVDGIIDSGDDLHMGTQKFKAAIDGNGFKGTWTENGGGDVSGRFYGPAGEEVAGKYSYRPTDAEKGGFGVFAGKKEQD

SEQ ID NO: 72943 - protein, 479 aa, Neisseria meningitidis
MFKRSVIAMACIFALSACGGGGGGSPDVKSADTLSKPAAPVVSEKETEAKEDAPQAGSQGQGAPSAQGSQDMAAVSEENTGNGGAVTADNPKNEDEVAQNDMPQNAAGTDSSTPNHTPDPNMLAGNMENQATDAGESSQPANQPDMANAADGMQGDDPSAGGQNAGNTAAQGANQAGNNQAAGSSDPIPASNPATTNSGGDFGRVDLANGIKLDGGSENVTLTHCKDKVCGSNFLDEEAPSKSEFEKLSDAEKINKYKKNGGKFTGLVATRVENNGLNQYTIIYQAQPTRSARSRRSLPAEMPLIPVNQADRLIVDGEVVSLTGHSGNIFAPEGNYRYLTYGAEKLSGGSYALRVQGEPAKGEMLAGTAVYNGEVLHFHMENGRPSPSGGRFAAKVDFGSKSVDGIIDSGDDLHMGTQKFKAVIDGNGFKGTWTENGGGDVSGRFYGPAGEEVAGKYSYRPTDAEKGGFGVFAGKKEQD

SEQ ID NO: 72944 - protein, 492 aa, Neisseria meningitidis
MFKRSVIAMACIFALSACGGGGGGSPDVKSADTPSKPAAPVVAEKETEAKEDAPQAGSQGQGAPSAQGSQDMAAVSAENTGNGGAATADKPKNEDAGAQNDMPQNAADTDSLTPNHATAPNMPAGNMGNQAPDTGESAQPENKPDMANAADGIQGDDPSAGGENAGNTAAQGTNQAENNQTAGSQNPASSTNPSTTNSGGDFGRTNVGNSVVIDGPSQNITLTHCKGDSCSGNNFLDEEVQLKSEFEKLSDADKISNYKKDGKNDGKNDKFVGLVADSVQMKGINQYIIFYKPKPTSFARFRRSARSRRSLPAEMPLIPVNQADTLIVDGEAVSLTGHSGNIFAPEGNYRYLTYGAEKLPGGSYALRVQGEPAKGEMLAGTAVYNGEVLHFHTENGRPSPSRGRFAAKVDFGSKSVDGIIDSGDGLHMGTQKFKAAIDGNGFKGTWTENGGGDVSGKFYGPAGEEVAGKYSYRPTDAEKGGFGVFAGKKEQD

SEQ ID NO: 72945 - protein, 422 aa, Neisseria meningitidis
MFKRSVIAMACIVALSACGGGGGGSPDVKSADTPSKPAAPVVAEKETEVKEDAPQAGSQGQDVPSKQGSQDMAAVSAENTGNGGSATTDKPKNEDEGAQNDMPQNAAESANQTGNNQPAGSQNPAPSTNPNATNGGGDFGRTNVANGVLIDGPSQNITLTHCKGDSCDNGNLLDEEAPSKSEFESLNDSGRIDKYKKDGQDKFTNLVATKVEKKGLNKYVIFYTDTPPTRSARSRRLRRSLPAEMPLIPVNQADTLIVDGEAVSLTGHSGNIFAPEGNYRYLTYGAEKLSGGSYALSVQGEPAKGEMLAGTAVYNGEVLHFHTENGRSYPTKGRFAAKVDFGSKSVDGIIDSGDDLHMGKQKFKAAIDGNGFKGTWTENGGGDVSGRFYGPAGEEVAGKYSYRPTDAEKGGFGVFAGKKEQD

SEQ ID NO: 72946 - protein, 487 aa, Neisseria meningitidis
MFKRSVIAMACIFALSACGGGGGGSPDVKSADTLSKPAAPVVSEKETEAKEDAPQAGSQGQGAPSAQGGQDMAAVSEENTGNGGAAATDKPKNEDEGAQNDMPQNAADTDSLTPNHTPASNMPAGNMENQAPDAGESEQPANQPDMANTADGMQGDDPSAGGENAGNTAAQGTNQAENNQTAGSQNPASSTNPSATNSGGDFGRTNVGNSVVIDGPSQNITLTHCKGDSCSGNNFLDEEVQLKSEFEKLSDADKINNYKKDGKNNNKFVGLVADRVKKDGTNKYIIFYTDNPPTRSARSRRSRRSLPAEMPLIPVNQADTLIVDGEAVSLTGHSGNIFAPEGNYRYLTYGAEKLSGGSYALRVQGEPAKGEMLAGTAVYNGEVLHFHTENGRPYPTRGRFAAKVDFGSKSVDGIIDSGDDLHMGTQKFKAAIDGNGFKGTWTENGSGDVSGRFYGPGGEEVAGKYSYRPTDAEKGGFGVFAGKKEQD

SEQ ID NO: 72947 - protein, 492 aa, Neisseria meningitidis
MFKRRVIAMACIFALSACGGGGGGSPDVKSAYIDVKPAAPVVSEKETEAKEDAPQAGSQGQGAPSAQGGQDMAAVSEENTGNGGAAATDKPKNEDEGAQNDMPQNAADTDSLTPNHTPASNMPAGNMENQAPDAGESEQPANQPDMANTADGMQGDDPSAGGENAGNTAAQGTNQAENNQTAGSQNPASSTNPSATNSGGDFGRTNVGNSVVIDGPSQNITLTHCKGDSCSGNNFLDEEVQLKSEFEKLSDADKISNYKKDGKNDGKNDKFVGLVADSVQMKGINQYIIFYKPKPTSFARFRRSARSRRSLPAEMPLIPVNQADTLIVDGEAVSLTGHSGNIFAPEGNYRYLTYGAEKLPGGSYALRVQGEPSKGEMLAGTAVYNGEVLHFHTENGRPSPSRGRFAAKVDFGSKSVDGIIDSGDGLHMGTQKFKAAIDGNGFKGTWTENGGGDVSGKFYGPAGEEVAGKYSYRPTDAEKGGFGVFAGKKEQD

SEQ ID NO: 72948 - protein, 497 aa, Neisseria meningitidis
MFKRSVIAMACIVALSACGGGGGGSPDVKSADTLSKPAAPVVTEDVGEEVLPKEKKDEEAVSGAPQADTQDATAGKGGQDMAAVSAKNTGNGGAATTDNPENKDEGPQNDMPQNAADTDSSTPNHTPAPNMPTRDMGNQAPDAGESAQPANQPDMANAADGMQGDDPSAGGENAGNTAAAESANQTGNNQPAGSSDSAPASNPAPANGGSDFGRVDLANGIKLDSGSENVTLTHCKDKVCDRDFLDEEAPPKSEFESLDDSGRINKYKKDGTSDKFTNLVATEVKANGTNKYVIIYKDKSTSSARVRRSARSRRSLPAEMPLIPVNQADTLIVDGEAVILTGHSGNIFAPEGNYRYLTYGAEKLSGGSYALSVQGEPAKGEMLAGTAVYNGEVLHFHTENGRSYPTKGRFAAKVDFGSKSVDGIIDSGDDLHMGTQKFKAVIDGNGFKGTWTENGGGDVSGRFYGPAGEEVAGKYSHRPTDAEKGGFGVFAGKKEQD

SEQ ID NO: 72949 - protein, 487 aa, Neisseria meningitidis
MFKRSVIAMACIFALSACGGGGGGSPDVKSADTLSKPAAPVVSEKETEAKEDAPQAGSQGQGAPSTQGSQDMAAVSAKNTGNGGAATTDTPKNEDEGAQDDMPQKAAGTDSLTPNHTPAPNMPAGDMGNQAPDNGESAQPANQPDAANAGDGIQGDDPSAGENAGNTASAESANQTGNNQPAGSSDSAPASNPAPANGGSNFGRVDLANGIKLDSGSENVTLTHCKDTVCGSDFLDEEAPSKSEFESLSDEKKIEKYKKDGEKFTNLVATEVQANGVNKYVIIYKDKSASSSSARFRRSARSRRSLPAEMPLIPVNQADTLIIDGEAVSLTGHSGNIFAPEGNYRYLTYGAEKLSGGSYALRVQGEPAKGEMLAGTAVYNGEVLHFHMENGRPSPSGGRFAAKVDFGSKSVDGIIDSGDDLHMGTQKFKAVIDGNGFKGTWTENGGGDVSGKFYGPAGEEVAGKYSYRPTDAEKGGFGVFAGKKEQD

SEQ ID NO: 72950 - protein, 494 aa, Neisseria meningitidis
MFKRSVIAMACIFALSACGGGGGGSPDVKSADTLSKPAAPVVAEDAGEEVLPKEKKDEEAVGGAPQADTQDATAGKNSQDMAAVSAKNTGNGGSATTDKPKNEDEGPQNDMPQNAADTDSLTPNHTPAPNMPTGDMGNQAPDSGESAQPANQPDMANAADGIQGDDPSVGENAGNTAAQGTNQAENNQAAGSSDSAPASNPAPANGGSNFGRVDLANGIKLDGGSENVTLTHCKDKVCGSDFLDEEAPSKSEFESLDDSGRINKYKKDGQDKFTNLVATEVKANGTNKYVIIYKDKSTSSVRVRRSARSRRSLPAEMPLIPVNQADTLIVDGEAVSLTGHSGNIFAPEGNYRYLTYGAEKLSGGSYALSVQGEPAKGEMLAGTAVYNGEVLHFHTENGRPSPFRGRFAAKVDFGSKSVDGIIDSGDDLHMGKQKFKAAIDGNGFKGNWTENGGGDVSGRFYGPAGEEVAGKYSYRPTDAEKGGFGVFAGKKEQD

SEQ ID NO: 72951 - protein, 480 aa, Neisseria meningitidis
MFKRSVIAMACIVALSACGGGGGGSPDVKSADTPSKPAAPVVAEKETEVKEDAPQAGSQGQGAPSTQGSQDMAAVSAKNTGNGGSATTDKPKNEDEGPQNDMPQNAADTDSLTPNHTPAPNMPTGDMGNQAPDYGESAQPENQPDAANAGDGIQGDDPSAGGENAGNTAAQGTNQAENNQAAGSQNPASSTNPSTTNSGGDFGRTNVGNSVVIDGPSQNITLTHCKGDSCNDDNLLYEEAPSKSEFESLSDEKKIEKYKKDGEKFTGLVAIKVENNGLNKYTIIYQAQPTRSARSRRSLPAEMPLIPVNQADTLIVDGEAVSLTGHSGNIFAPEGNYRYLTYGAEKLSGGSYALRVQGEPAKGEMLAGTAVYNGEVLHFHMENGRPSPFRGRFAAKVDFGSKYVDGIIDSGDDLHMGTQKFKAVIDGNGFKGTWTENGGGDVSGRFYGPVGEEVAGKYSYRPTDAEKGGFGVFAGKKEQD

SEQ ID NO: 72952 - protein, 479 aa, Neisseria meningitidis
MFKRSVIAMACIFALSACGGGGGGSPDVKSADTLSKPAAPVVSEKETEAKEDAPQAGSQGQGAPSAQGSQDMAAVSEKNTGNGGAVTADNPKNEDEVAQNDMPQNAAGTDSSTPNHTPDPNMLAGNMENQATDAGESSQPANQPDMANAADGMQGDDPSAGGQNAGNTAAQGANQAGNNQAAGSSDPIPVSNPATTNSGGDFGRVDLANGIKLDGGSENVTLTHCKDKVCGSNFLDEEAPSKSEFEKLSDAEKINKYKKNGGKFTGLVATRVENNGLNQYTIIYQAQPTRSARSRRSLPAEMPLIPVNQADRLIVDGEVVSLTGHSGNIFAPEGNYRYLTYGAEKLSGGSYALRVQGEPAKGEMLAGTAVYNGEVLHFHMENGRPSPSGGRFAAKVDFGSKSVDGIIDSGDDLHMGTQKFKAVIDGNGFKGTWTENGGGDVSGRFYGPAGEEVAGKYSYRPTDAEKGGFGVFAGKKEQD

SEQ ID NO: 72953 - protein, 477 aa, Neisseria meningitidis
MFKRSVIAMACIFALSACGGGGGGSPDVKSADTPSKPAAPVVFEKETEAKEDAPQAGSQGQGAPSAQGSQDMAAVSEENTGNGGAATADKPKNEDEGAQDDMPQKAADTDSLTPNHTPAPNMPAGDMGNQAPDSGESAQPANQPDMANAADGIQGDDPSVGENAGDQAANQAENNQVGGSQNPAPSTNPSTTNGGDFGRVDLANGIKLDGGSENVTLTHCKDKVCGSDFLDEEAPPKSEFESLSDEERIKKYKKNGGKFTGLVATRVENNGLNQYTIIYQAQPTRSARSRRSRRSLPAEIPLIPVNQADTLIVDGEAVSLTGHSGNIFAPEGNYRYLTYGAEKLPGGSYALRVQGEPAKGEMLAGTAVYNGEVLHFHTENGRPSPFRGRFAAKVDFGSKSVDGIIDSGDDLHMGTQKFKAAIDGNGFKGTWTENGSGDVSGKFYGPAGEEVAGKYSYRPTDAEKGGFGVFAGKKEQD

SEQ ID NO: 72954 - protein, 487 aa, Neisseria meningitidis
MFKRSVIAMACIVALSACGGGGGGSPDVKSADTLSKPAAPVVTEDVGEEVLPKEKKDEEAVGGAPQADTQDETAGENSQDMAVVSAENTGNGGAATTDKPKNEDEGAQNDMPQNAADTDSLIPNHTPAPNMPAGDMENQAPDNGESVQPANQPDAANAGDGIQGDDPSAGGENAGDQAANQAENNQVGGSQNPAPSTNPSTTNGGDFGRVDLANGIKLDGGSENVTLTHCKDKVCGSDFLDEEAPPKSEFESLSDEERIKKYKKNGGKFTGLVATRVENNGLNQYTIIYQAQPTRSARSRRSRRSLPAEIPLIPVNQADTLIVDGEAVSLTGHSGNIFAPEGNYRYLTYGAEKLPGGSYALRVQGEPAKGEMLAGTAVYNGEVLHFHTENGRPSPFRGRFAAKVDFGSKSVDGIIDSGDDLHMGTQKFKAAIDGNGFKGTWTENGSGDVSGKFYGPAGEEVAGKYSYRPTDAEKGGFGVFAGKKEQD

SEQ ID NO: 72955 - protein, 490 aa, Neisseria meningitidis
MFKRSVIAMACIFALSACGGGGGGSPDVKSADTLSKPAAPVVSEKETEAKEDAPQAGSQGQGAPSTQGSQDMAAVSAENTGNGGAATTDKPKNEDEGAQNDMPQNAADTDSLTPNHTPAPNMPAGNMENQAPDAGESAQPANQPDMANAADGIQGDDPSAGGQNAGNTAAQGANQAGNNQPAGSSDSSPASNPASANGGSNFGRVDLANGVLIDGPSQNITLTHCKGDSCSGNNFLDEEVQLKSEFEKLSDADKISNYKKDGKNDRKNDKFVGLFADRVKKDGINKYIIFYTDNPPTRSARSRRLRRSLPAEMPLIPVNQADALIVDGEAVSLTGHSGNIFAPEGNYRYLTYGAEKLSGGSYALRVQGEPAKGEMLAGTAVYNGEVLHFHTENGRPYPSGGRFAAKVDFGSKSVDGIIDSGDDLHMGTQKFKAAIDGNGFKGNWTENGGGDVSGRFYGPTGEEVAGKYSYRPTDAEKGGFGVFAGKKEQD

SEQ ID NO: 72956 - protein, 423 aa, Neisseria meningitidis
MFERSVIAMACIFALSACGGGGGGSPDVKSADTPSKPAAPVVAEKETDAKEDAPQAGSQGQGAPSAQGSQDMAAVSEENTGNGGAATADNPKNEDEGAQNDMPQNAAESANQTGNNQPAGSQNPAPSTNPNATNGGGDFGRTNVANGVLIDGPSQNITLTHCKDTVCGSNFLAEEAPSKSEFESLDDSGRINKYKKDGQDKFTNLVATEVKANGTNKYVIIYKDKSTSSARVRRSARSRRSLPAEMPLIPVNQADTLIVDGEAVSLTGHSGNIFAPEGNYRYLTYGAEKLSGGSYALSVQGKPAKGEMLAGTAVYNGEVLHFHTENGRSYPTRGRFAAKVDFGSKSVDGIIDSGDDLHMGTQKFKAAIDGNGFKGNWTENGGGDVSGRFYGPAGEEVAGKYSYRPTDAEKGGFGVFAGKKEQD

SEQ ID NO: 72957 - protein, 480 aa, Neisseria meningitidis
MFKRSVIAMACIVALSACGGGGGGSPDVKSADTPSKPAAPVVAEKETEVKEDAPQAGSQGQGAPSTQGSQYMGAFSAKNTGNGGSATTDKPKNEDEGPQNDMPQNAADTDSLTPNHTPAPNMPTGDMGNQAPDYGESAQPENQPDAANAGDGIQGDDPSAGGENAGNTAAQGTNQAENNQAAGSQNPASSTNPSTTNSGGDFGRTNVGNSVVIDGPSQNITLTHCKGDSCNDDNLLYEEAPSKSEFESLSDEKKIEKYKKDGEKFTGLVAIKVENNGLNKYTIIYQAQPTRSARSRRSLPAEMPLIPVNQADTLIVDGEAVSLTGHSGNIFAPEGNYRYLTYGAEKLSGGSYALRVQGEPAKGEMLAGTAVYNGEVLHFHMENGRPSPFRGRFAAKVDFGSKYVDGIIDSGDDLHMGTQKFKAVIDGNGFKGTWTENGGGDVSGRFYGPVGEEVAGKYSYRPTDAEKGGFGVFAGKKEQD

SEQ ID NO: 72958 - protein, 470 aa, Neisseria meningitidis
MFERSVIAMACIFALSACGGGGGGSPDVKSADTPSKPAAPVVAEKETDAKEDAPQAGSQGQGAPSTQGSQDMAAVSAENTGNGGSATTDKPKNEDEGPQNDMPQNAADTDSLTPNHTTAPNMPAGNMENQPDAANAGDGIQGDDPSAGGENAGNTAAAESANQTGNNQPAGSSDSAPASNPAPANGGGDFGRTNVGNSVVIDGPSQNITLTHCKGDSCDNGNLLDEEAPSKSEFEKLSESERMEKYKKDGKDKFVGLVATTVKMEGINKYIIFYTDKPPTRSARSRRSLPAEMPLIPVNQADTLIVDGEAVSLTGHSGNIFAPEGNYRYLTYGAEKLSGGSYALRVQGEPAKGEMLAGTAVYNGEVLHFHTENGRPYPSGGRFAAKVDFGSKSVDGIIDSGDDLHMGTQKFKAAIDGNGFKGTWTENGGGDVSGRFYGPAGEEVAGKYSYRPTDAEKGGFGVFAGKKEQD

SEQ ID NO: 72959 - protein, 492 aa, Neisseria meningitidis
MFKRSVIAMACIFALSACGGGGGGSPDVKSADTLSKPAAPVVSEKETEAKEDAPQAGSQGQGAPSAQGGQDRAAVSEENTGNGGAAATDNPKNEDEGAQNDMPQNAADTDSLTPNHTPASNMPAGNMENQAPDAGESEQPANQPDMANTADGMQGDDPSAGGENAGNTAAQGTNQAENNQTAGSQNPASSTNPSATNSGGDFGRTNVGNSVVIDGPSQNITLTHCKGDSCSGNNFLDEEVQLKSEFEKLSDADKISNYKKDGKNDGKNDKFVGLVADSVQMKGINQYIIFYKPKPTSFARFRRSARSRRSLPAEMPLIPVNQADTLIVDGEAVSLTGHSGNIFAPEGNYRYLTYGAEKLPGGSYALRVQGEPSKGEMLAGTAVYNGEVLHFHTENGRPSPSRGRFAAKVDFGSKSVDGIIDSGDGLHMGTQKFKAAIDGNGFKGTWTENGGGDVSGKFYGPAGEEVAGKYSYRPTDAEKGGFGVFAGKKEQD

SEQ ID NO: 72960 - protein, 487 aa, Neisseria meningitidis
MFKRSVIAMACIVALSACGGGGGSPDVKSADTPSKPAAPVVAEKETEVKEDAPQAGSQGQDVPSKQGSQDMAAVWAENTGNGGSATTDKPKNEDEGPQNDMPQNAADTDSLTPNHTPAPNMPTGDMGNQAPDSGESAQPANQPDMANAADGIQGDDPSVGENAGNTADQAANQAENNQVGGSQNPASSSNPNATNSGGDFGRINVANGIKLDGGSENVTLTHCKDKVCDRDFLDEEAPPKSEFEKLSDEEKINKYKKDEQRENFVGLVADRVEKNGTNKYVIIYKDKSASSSSARFRRSARSRRSLPAEMPLIPVNQADTLIVDGEAVSLTGHSGNIFAPEGNYRYLTYGAEKLSGGSYALSVQGEPAKGEMLAGTAVYNGEVLLFHMENGRPSPSGGRFAAKVDFGSKSVDGIIDSGDDLHMGTQKFKAVIDGNGFKGTWTENGGGDVSGRFYGPAGEEVAGKYSYRPTDAEKGGFGVFAGKKEQD

SEQ ID NO: 72961 - protein, 246 aa, Neisseria meningitidis
PSKSEFEQLSDEDKIKKYKKDGEKFTGLVADRLQMKGTNQYIIFYKPKTTSSARFRRSARSRRSLPAEMPLIPVNQADTLIVDGEAVSLTGHSGNIFAPEGNYRYLTYGAEKLSGGSYALSVQGEPAKGEMLAGTAVYNGEVLHFHTENGRSYPTKGRFAAKVDFGSKSVDGIIDSGDDLHMGKQKFKAAIDGNGFKGTWTENGGGDVSGRFYGPAGEEVAGKYSYRPTDAEKGGFGVFAGKKEQD

SEQ ID NO: 72962 - protein, 426 aa, Neisseria meningitidis
MFERSVIAMACIFALSACGGGGGGSPDVKSADTPSKPAAPVVAEKETEVKEDAPQAGSQGQGAPSTQGSQDMAAVSAENTGNAGAATTDKPKNEDEGPQNDMPQNAGNTAAQGTNQAENNQVGGSQNPAPSSNPNATNGGNFGRVDLANGVLIDGPSQNITLTHCKSDSCNGDNLLSEEAPSKSEFEQLSDEDKIKKYKKDGEKFTGLVADRLQMKGTNQYIIFYKPKTTSSARFRRSARSRRSLPAEMPLIPVNQADTLIVDGEAVSLTGHSGNIFAPEGNYRYLTYGAEKLSGGSYALSVQGEPAKGEMLAGTAVYNGEVLHFHTENGRSYPTKGRFAAKVDFGSKSVDGIIDSGDDLHMGKQKFKAAIDGNGFKGTWTENSGGDVSGKFYGPAGEEVAGKYSYRPTDAEKGGFGVFAGKKEQD

SEQ ID NO: 72963 - protein, 419 aa, Neisseria meningitidis
MFKRSVIAMACIVALSACGGGGGGSPDVKSADTPSKPAAPVVAEKETEVKEDAPQAGSQGQGAPSTQGSQDMAAVSAENTGNGGAATTDKPKNEDEGPQNDMPQNAAESANQTGNNQPAGSQNPAPSTNPNATNGGGDFGRTNVGNSVVIDGPSQNITLTHCKGDSCTGDNLLSEEAPSRSEFESLNDSGRIDKYKKDGQDKFTNLVATKVEKKGLNKYIIFYTDKPPTRSARSRRSLPTEMPLIPVNQADTLIIDGEAVSLTGHFGNIFAPEGNYRYLTYGAEKLPGGSYALRVQGEPAKGEMLAGTAVYNGEVLHFHTENGRPSPFRGRFAAKVDFGSKSVDGIIDSGDDLHMGTQKFKAAIDGNGFKGTWTENGSGDVSGKFYGPAGEEVAGKYSYRPTDAEKGGFGVFAGKKEQD

SEQ ID NO: 72964 - protein, 425 aa, Neisseria meningitidis
MFERSVIAMACIFALSACGGGGGGSPDVKSADTLSKPAAPVVAEKETEVKEDAPQAGSQGQGAPSTQGSQDMAAVSAENTGNGGAATTDKPKNEDEGPQNDMPQNSAESANQTGNNQPADSSDSAPASNPAPANGGSNFGRVDLANGVLIDGPSQNITLTHCKGDSCNGDNLLDEEAPSKSEFENLNESERIEKYKKDGKSDKFTNLVATEVKANGTNKYVIIYKDKSTSSARVRRSARSRRSLPAEMPLIPVNQADTLIVDGEAVSLTGHSGNIFAPEGNYRYLTYGAEKLSGGSYALSVQGEPAKGEMLAGTAVYNGEVLHFHMENGRPSPSGGRFAAKVDFGSKSVDGIIDSGDDLHMGTQKFKAVIDGNGFKGTWTENGGGDVSGRFYGPAGEEVAGKYSYRPTDAEKGGFGVFAGKKEQD

SEQ ID NO: 72965 - protein, 492 aa, Neisseria meningitidis
MFKRSVIAMACIFALSACGGGGGGSPDVKSADTLSKPAAPVVSEKETEAKEDAPQAGSQGQGAPSAQGGQDMAAVSEENTGNGGAAATDKPKNEDEGAQNDMPQNAADTDSLTPNHTPASNMPAGNMENQAPDAGESEQPANQPDMANTADGMQGDDPSAGGENAGNTAAQGTNQAENNQTAGSQNPASSTNPSATNSGGDFGRTNVGNSVVIDGPSQNITLTHCKGDSCSGNNFLDEEVQLKSEFEKLSDADKISNYKKDGKNDGKNDKFVGLVADSVQMKGINQYIIFYKPKPTSFARFRRSARSRRSLPAEMPLIPVNQADTLIVDGEAVSLTGHSGNIFAPEGNYRYLTYGAEKLPGGSYALRVQGEPSKGEMLAGTAVYNGEVLHFHTENGRPSTSRGRFAAKVDFGSKSVDGIIDSGDGLHMGTQKFKAAIDGNGFKGTWTENGGGDVSGKFYGPAGEEVAGKYSYRPTDAEKGGFGVFAGKKEQD

SEQ ID NO: 72966 - protein, 425 aa, Neisseria meningitidis
MFERSVIAMACIFALSACGGGGGGSPDVKSADTLSKPAAPVVAEKETEVKEDAPQAGSQGQGAPSTQGSQDMAAVSAENTGNGGAATTDKPKNEDEGPQNDMPQNSAESANQTGNNQPADSSDSAPASNPAPANGGSNFGRVDLANGVLIDGPSQNITLTHCKGDSCNGDNLLDEEAPSKSEFENLNESERIEKYKKDGKSDKFTNLVATAVQANGTNKYVIIYKDKSTSSARVRRSARSRRSLPAEMPLIPVNQADALIVDGEAVSLTGHSGNIFAPEGNYRYLTYGAEKLSGGSYALRVQGEPAKGEMLAGTAVYNGEVLHFHTENGRPYPSGGRFAAKVDFGSKSVDGIIDSGDDLHMGTQKFKAVIDGNGFKGTWTENGGGDVSGRFYGPAGEEVAGKYSYRPTDAGKGGFGVFAGKKEQD

SEQ ID NO: 72967 - protein, 425 aa, Neisseria meningitidis
MFKRSVIAMACIVALSACGGGGGGSPDVKSADTPSKPAAPVVAEKETEVKEDAPQAGSQGQGAPSTQGSQDMAAVSAENTGNGGAATTDKPKNEDEGPQNDMPQNSAESANQTGNNQPADSSDSAPASNPAPANGGSNFGRVDLANGVLIDGPSQNITLTHCKGDSCNGDNLLDEEAPSKSEFENLNESERIEKYKKDGKSDKFTNLVATAVQANGTNKYVIIYKDKSTSSARVRRSARSRRSLPAEMPLIPVNQADTLIVDGEAVSLTGHSGNIFAPEGNYRYLTYGAEKLSGGSYALSVQGEPAKGEMLAGTAVYNGEVLHFHTENGRSYPTRGRFAAKVDFGSKSVDGIIDSGDDLHMGTQKFKAAIDGNGFKGTWTENGGGDVSGRFYGPAGEEVAGKYSYRPTDAEKGGFGVFAGKKEQD

SEQ ID NO: 72968 - protein, 481 aa, Neisseria meningitidis
MFKRSVIAMACIFALSACGGGGGGSPDVKSADTLSKPAAPVVSEKETEAKEDAPQAGSQGQGAPSAQGSQDMAAVSEENTGNGGAATADNPKNEDEAQNDMPQNTAGTDSLTPNHTPASNMPAGNMENQAPDAGESAQPENKPDMANAADGIQGDDPSADGENAGNTAAQGTNQAENNQTAGSQNPASSTNPNATNGGGDFGRTNVGNSVVIDGPSQNITLTHCKGDPCNGDNLLDEEAPSKSEFEKLNESERIEKYKKDGKDKFVGLVATTVKMEGINKYIIFYTDKPPTRSARSRRSLPAEMPLIPVNQADTLIVDGEAVSLMGHSGNIFAPEGNYRYLTYGAEKLSGGSYALRVQGEPAKGEMLAGTAVYNGEVLHFHTENGRPYPSGGRFAAKVDFGSKSVDGIIDSGDDLHMGTQKFKAAIDGNGFKGTWTENGGGDVSGRFYGPAGEEVAGKYSYRPTDAEKGGFGVFAGKKEQD

SEQ ID NO: 72969 - protein, 482 aa, Neisseria meningitidis
MFKRSVIAMACIFALSACGGGGGGSPDVKSADTLSKPAAPVVSEKETEAKEDAPQAGSQGQGAPSAQGGQDMAAVSEENTGNGGAAATDKPKNEDEGAQNDMPQNAADTDSLTPNHTPASNMPAGNMENQAPDAGESEQPANQPDMANTADGMQGDDPSAGGENAGNTAAQGANQAGNNQAAGSSDPIPASNPATTNSGGDFGRTNVANGIKLDGPSQNITLTHCKGDPCNGDNLLDEEAPSKSEFEKLNESERIEKYKKDGKDKFVGLVATTVKMEGTNKYIIFYTDKPPTRSARSRRSLPAEMPLIPVNQADTLIVDGEAVSLTGHSGNIFAPEGNYRYLTYGAEKLSGGSYALRVQGEPAKGEMLAGTAVYNGEVLHFHTENGRPYPSGGRFAAKVDFGSKSVDGIIDSGDDLHMGTQKFKAAIDGNGFKGTWTENGGGDVSGRFYGPAGEEVAGKYSYHPTDAEKGGFGVFAGKKEQD

SEQ ID NO: 72970 - protein, 473 aa, Neisseria meningitidis
MFKRSVIAMACIFALSACGGGGGGSPDVKSADTLSKPAAPVVSEKETEAKEDAPQAGSQGQGAPSAQGSQDMAAVSEENTGNGGEATADNPKNEDEGAQDDMPQKAAGTDSSTPNHTPAPNMPAGNMENQPDMANTADGMQGDDPSAGENAGNTAAQGANQAENNQAAGSSDSTPASNPAPTNGGGDFGRTNVANGVLIDGPSQNITLTHCKGDSCSGDNLLDEEAPSKSEFEKLSDADKINNYKKDGKNNNKFVGLVADRVKKDGTNKYIIFYTDNPPTRSARSRRSRRSLPAEMPLIPVNQADTLIVDGEAVSLTGHSGNIFAPEGNYRYLTYGAEKLPGGSYALRVQGEPAKGEMLAGAAVYNGEVLHFHTENGRPYPTRGRFAAKVDFGSKYVDGIIDSGDDLHMGTQKFKAAIDGNGFKGTWTENGSGDVSGRFYGPAGEEVAGKYSYRPTDAEKGGFGVFAGKKEQD

SEQ ID NO: 72971 - protein, 486 aa, Neisseria meningitidis
MFKRSVIAMACIVALSACGGGGGGSPDVKSADTPSKPAAPVVAEKETEVKEDAPQAGSQGQGAPSAQGSQDMAAVSEENTGNGGAATADNPKNEDEGAQDDMPQKAAGTDSSTPNHTPDPNMPAGNMENQATDAGESEQPANQPDMANTADGMQGDDPSAGGENAGNTAAQGANQAGNNQAAGSSDPIPASNPATTNSGGDFGRTNVANGIKLDGPSQNITLTHCKDTVCGSNFLAEEAPSKSEFESLDDSGRINKYKKDGQDKFTNLVATEVKANGTNKYVIIYKDKSTSSARVRRSARSRRSLPAEMPLIPVNQADTLIVDGEAVILTGHSGNIFEPEGNYRYLTYGAEKLPGGSYALRVQGEPSKGEMLAGAAVYNGEVLHFHTENGRPYPTRGRFAAKVDFGSKSVDGIIDSGDDLHMGTQKFKAVIDGNGFKGTWTENGSGDVSGKFYGPAGEEVAGKYSYRPTDAEKGGFGVFAGKKEQD

SEQ ID NO: 72972 - protein, 425 aa, Neisseria meningitidis
MFERSVIAMACIFALSACGGGGGGSPDVKSADTPSKPAAPVVAEKETEVKEDAPQAGSQGQGAPSTQGSQDMAAVSAENTGNGGAATTDKPKNEDEGPQNDMPQNSAESANQTGNNQPADSSDSAPASNPAPANGGSNFGRVDLANGVLIDGPSQNITLTHCKGDSCNGDNLLDEEAPSKSEFENLNESERIEKYKKDGKSDKFTNLVATAVQANGTNKYVIIYKDKSTSSARVRRSARSRRSLPAEMPLIPVNQADTLIVDGEAVSLTGHSGNIFAPEGNYRYLTYGAEKLSGGSYALSVQGEPAKGEMLAGTAVYNGEVLHFHTENGRSYPTKGRFAAKVDFGSKSVDGIIDSGDDLHMGKQKFKAAIDGNGFKGTWTENGGGDVSGRFYGPAGEEVAGKYSYRPTDAEKGGFGVFAGKKEQD

SEQ ID NO: 72973 - protein, 494 aa, Neisseria meningitidis
MFERSVIAMACIFALSACGGGGGGSPDVKSADTPSKPAAPVVTEDVGEEVLPKEKKDEEAVSGAPQADTQDATAGKGGQDMAAVSAENTGNGGAATTDKPKNEDAGVQNDMPQNAADTDSLTPNHTPAPNMPTGDMGNQAPDSGESAQPANQPDMENAADGIQGDDPSAGGENAGNTAAQGTNQAENNQAAGSSDSAPASNPAPANGGGDFGRTNVANGVLIDGPSQNITLTHCKGDSCDNGNLLDEEAPSKSEFESLNDSGRIDKYKKDGQDKFTNLVATKVEKKGLNKYVIFYTDTPPTRSARSRRLRRSLPAEMPLIPVNQADTLIVDGEAVSLTGHSGNIFAPEGNYRYLTYGAEKLSGGSYALRVQGEPSKGEMLAGTAVYNGEVLHFHTENGRPSPSRGRFAAKVDFGSKSVDGIIDSGDGLHMGTQKFKAAIDGNGFKGTWTENGGGDVSGKFYGPAGEEVAGKYSYRPTDAEKGGFGVFAGKKEQD

SEQ ID NO: 72974 - protein, 494 aa, Neisseria meningitidis
MFERSVIAMACIFALSACGGGGGGSPDVKSADTPSKPAAPVVTEDVGEEVLPKEKKDEEAVSGAPQADTQDATAGKGGQDMAAVSAENTGNGGAATTDKPKNEDAGVQNDMPQNAADTDSLTPNHTPAPNMPTGDMGNQAPDSGESAQPANQPDMENAADGIQGDDPSAGGENAGNTAAQGTNQAENNQAAGSSDSAPASNPAPANGGGDFGRTNVANGVLIDGPSQNITLTHCKGDSCDNGNLLDEEAPSKSEFESLNDSGRIDKYKKDGQDKFTNLVATKVEKKGLNKYVIFYTDTPPTRSARSRRLRRSLPAEMPLIPVNQADTLIVDGEAVSLTGHSGNIFAPEGNYRYLTYGAEKLSGGSYALSVQGEPAKGEMLAGTAVYNGEVLHFHTENGRSYPTKGRFAAKVDFGSKSVDGIIDSGDDLHMGKQKFKAAIDGNGFKGNWTENGGGDVSGRFYGPAGEEVAGKYSYRPTDAEKGGFGVFAGKKDQD

SEQ ID NO: 72975 - protein, 436 aa, Neisseria meningitidis
MFKRSVIAMACIFALSACGGGGGGSPDVKSADTPSKPAAPVVAEDAGEEVLPKEKKDEEAVGGAPQADTQDATAGEGSQGMAAVSAENTGNSGAATTDNPQNEDEGAQNDMPQNAAESANQTGNNQSAGSSDSAPASNPAPANGGSNFGRVDLANGVLIDGPSQNITLTHCKGDSCNGDNLLDEEAPSKSEFENLNESERIEKYKKDGKSDKFTNLVATAVQANGTNKYVIIYKDKSASSSSARFRRSARSRRSLPAEMPLIPVNQADTLIVDGEAVSLTGHSGNIFAPEGNYRYLTYGAEKLSGGSYALRVQGEPAKGEMLAGTAVYNGEVLHFHTENGRSYPTRGRFAAKVDFGSKSVDGIIDSGDDLHMGTQKFKAVIDGNGFKGTWTENGGGDVSGRFYGPGGEEVAGKYSYRPTDAEKGGFGVFAGKKEQD

SEQ ID NO: 72976 - protein, 427 aa, Neisseria meningitidis
MFERSVIAMACIFALSACGGGGGGSPDVKSADTLSKPAAPVVAEKETEVKEDAPQAGSQGQGAPSTQGSQDMAAVSAENTGNGGAATTDKPKNEDEGPQNDMPQNSAESANQTGNNQSADSSDSAPASNPAPANGGSNFGRVDLANGVLIDGPSQNITLTHCKGDSCNGDNLLDEEAPSKSEFENLNESERIEKYKKDGKSDKFTNLVATAVQANGTNKYVIIYKDKSASSSSARFRRSARSRRSLPAEMPLIPVNQADTLIVDGEAVSLTGHSGNIFAPEGNYRYLTYGAEKLPGGSYALRVQGEPAKGEMLAGTAVYNGEVLHFHTENGRPYPTRGRFAAKVDFGSKSVDGIIDSGDDLHMGTQKFKAAIDGNGFKGTWTENGGGDVSGRFYGPAGEEVAGKYSYRPTDAEKGGFGVFAGKKEQD

SEQ ID NO: 72977 - protein, 485 aa, Neisseria meningitidis
MFKHSVIAMACIFALSACGGGGGGSPDVKSADTLSKPAAPVVSEKETEAKEDAPQAGSQGQGAPSAQGSQDMAAVSEENTGNGGAATADNPKNEDEGAQDDMPQKAAGTDSSTPNHTPDPNMPAGNMENQATDAGESSQPANQPDMANAADGMQGDDPSAGGQNAGNTAAQGANQAGNNQAAGSSDPIPASNPAPANGGGDFGRTNVANGVLIDGPSQNITLTHCKGDSCDNGNLLDEEAPSKSEFESLNDSGRIDKYKKDGQDKFTNLVATKVEKKGLNKYVIFYTDTPPTRSARSRRLRRSLPAEMPLIPVNQADTLIVDGEAVSLTGHSGNIFAPEGNYRYLTYGAEKLSGGSYALSVQGEPAKGEMLAGTAVYNGEVLHFHTENGRSYPTKGRFAAKVDFGSKSVDGIIDSGDDLHMGTQKFKAVIDGNGFKGTWTENGGGDVSGRFYGPTGEEVAGKYSYRPTDAEKGGFGVFAGKKEQD

SEQ ID NO: 72978 - protein, 493 aa, Neisseria meningitidis
MFKRSVIAMACIFALSACGGGGGGSPDVKSADTLSKPAVPVVAEDAGEEVLPKEKKDEEAVGGAPQADTQDATAGEGSQDMAAVSAENTGNGGAATTDKPKNEDAGAQNDMPQNAADTDSLTPNYTTAPNMPAVDMGNQAPDSGESAQPANQPDMANAADGIQGDDPSVGENAGNTADQAENQAENNQVGGSQNPASSTNPNATNGGGDFGRTNVGNSVVIDGPSQNITLTHCKGDSCNDDNLLYEEAPSKSEFESLNDSGRIDKYKKDGQDKFTNLVATKVEKKGLNKYVIFYTDTPPTRSARSRRLRRSLPAEMPLIPVNQADTLIVDGEAVSLTGHSGNIFAPEGNYRYLTYRAEKLPGGSYALRVQGEPAKGEMLAGTAVYNGEVLHFHTENGRPYPTRGRFAAKVDFGSKSVDGIIDSGDDLHMGTQKFKAAIDGNGFKGTWTENGGGDVSGRFYGPAGEEVAGKYSYRPTDAEKGGFGVFAGKKEQD

SEQ ID NO: 72979 - protein, 427 aa, Neisseria meningitidis
MFERSVIAMACIFALSACGGGGGGSPDVKSADTLSKPAAPVVAEKETEVKEDAPQAGSQGQGAPSTQGSQDMAAVSAENTGNGGAATTDKPKNEDEGPQNDMPQNSAESANQTGNNQPADSSDSAPASNPAPANGGSNFGRVDLANGVLIDGPSQNITLTHCKGDSCNGDNLLDEEAPSKSEFENLNESERIEKYKKDGKSDKFTNLVATAVQANGTNKYVIIYKDKSASSSSARFRRSARSRRSLPAEMPLIPVNQADTLIVDGEAVSLTGHSGNIFAPEGNYRYLTYGAEKLPGGSYALRVQGEPAKGEMLAGTAVYNGEVLHFHTENGRPYPTRGRFAAKVDFGSKSVDGIIDSGDDLHMGTQKFKAAIDGNGFKGTWTENGGGDVSGKFYGPAGEEVAGKYSYRPTDAEKGGFGVFAGKKEQD

SEQ ID NO: 72980 - protein, 488 aa, Neisseria meningitidis
MFKRSVIAMACIVALSACGGGGGGSPDVKSADTPSKPAAPVVAEKETEVKEDAPQAGSQGQDVPSKQGSQDMAAVSAENTGNGGSATTDKPKNEDEGPQNDMPQNAADTDSLTPNHTPAPNMPTGDMGNQAPDSGESAQPANQPDMANAADGIQGDDPSVGENAGNTADQAANQAENNQVGGSQNPASSSNPNATNSGGDFGRINVANGIKLDGGSENVTLTHCKDKVCDRDFLDEEAPPKSEFEKLSDEEKINKYKKDEQRENFVGLVADRVEKNGTNKYVIIYKDKSASSSSARFRRSARSRRSLPAEMPLIPVNQADTLIVDGEAVSLTGHSGNIFAPEGNYRYLTYGAEKLSGGSYALSVQGEPAKGEMLAGTAVYNGEVLHFHMENGRPSPSGGRFAAKVDFGSKSVDGIIDSGDDLHMGTQKFKAVIDGNGFKGTWTENGGGDVSGRFYGPAGEEVAGKYSYRPTDAEKGGFGVFAGKKEQD

SEQ ID NO: 72981 - protein, 497 aa, Neisseria meningitidis
MFERSVIAMACIVALSACGGGGGGSPDVKSADTLSKPAAPVVTEDVGEEVLPKEKKDEEAVSGAPQADTQDATAGKGGQDMAAVSAENTGNGGAATTDNPENKDEGPQNDMPQNAADTDSSTPNHTPAPNMPTRDMGNQAPDAGESAQPANQPDMANAADGMQGDDPSAGGENAGNTAAAESANQTGNNQPAGSSDSAPASNPAPANGGSDFGRVDLANGIKLDSGSENVTLTHCKDKVCDRDFLDEEAPPKSEFESLDDSGRINKYKKDGTSDKFTNLVATEVKANGTNKYVIIYKDKSTSSARVRRSARSRRSLPAEMPLIPVNQADTLIVDGEAVILTGHSGNIFAPEGNYRYLTYGAEKLSGGSYALSVQGEPAKGEMLAGTAVYNGEVLHFHTENGRSYPTKGRFAAKVDFGSKSVDGIIDSGDDLHMGTQKFKAVIDGNGFKGTWTENGGGDVSGRFYGPAGEEVAGKYSHRPTDAEKGGFGVFAGKKEQD

SEQ ID NO: 72982 - protein, 426 aa, Neisseria meningitidis
MFKRSVIAMACIVALSACGGGGGGSPDVKSADTPSKPAAPVVAEKETEVKEDAPQAGSQGQGAPSTQGSQDMAAVSAENTGNGGAATTDKPKNEDEGPQNDMPQNAGNTAAQGTNQAENNQVGGSQNPAPSSNPNATNGGNFGRVDLANGVLIDGPSQNITLTHCKSDSCNGDNLLSEEAPSKSEFEQLSDEDKIKKYKKDGEKFTGLVADRLQMKGTNQYIIFYKPKTTSSARFRRSARSRRSLPAEMPLIPVNQADTLIVDGEAVSLTGHSGNIFAPEGNYRYLTYGAEKLSGGSYALSVQGEPAKGEMLAGTAVYNGEVLHFHTENGRSYPTKGRFAAKVDFGSKSVDGIIDSGDDLHMGKQKFKAAIDGNGFKGTWTENGSGDVSGRFYGPAGEEVAGKYSYRPTDAEKGGFGVFAGKKEQD

SEQ ID NO: 72983 - protein, 489 aa, Neisseria meningitidis
MFKRSVIAMACIFALSACGGGGGGSPDVKSADTLSKPAAPVVSEKETEAKEDAPQAGSQGQGAPSAQGGQDMAAVSEENTGNGGAAATDKPKNEDEGAQNDMPQNAADTDSLTPNHTPASNMPAGNMENQAPDAGESEQPANQPDMANTADGMQGDDPSAGGENAGNTAAAESANQTGNNQPAGSSDSAPASNPAPANGGGDFGRTNVGNSVVIDGPSQNITLTHCKGDSCDGDNLLDEEAPSKSEFDNLSESERMEKYKKDGKSDKFTGFVADKLQMKGTNQYIIFYKPKTTSSARFRRSARSRRSLPAEMPLIPVNQADTLIVDGEAVILTGHSGNIFAPEGNYRYLTYGAEKLPGGSYALRVQGEPAKGEMLAGTAVYNGEVLHFHTENGRPSPSRGRFAAKVDFGSKSVDGIIDSGDGLHMGTQKFKAAIDGNGFKGTWTENGGGDVSGRFYGPTGEEVAGKYSYRPTDAGKGGFGVFVGKKEQD

SEQ ID NO: 72984 - protein, 427 aa, Neisseria meningitidis
MFERSVIAMACIFALSACGGGGGGSPDVKSADTLSKPAAPVVAEKETEVKEDAPQAGSQGQGAPSTQGSQDMAAVSAENTGNGGAATTDKPKNEDEGPQNDMLQNSAESANQTGNNQPADSSDSAPASNPAPANGGSNFGRVDLANGVLIDGPSQNITLTHCKGDSCNGDNLLDEEAPSKSEFENLNESERIEKYKKDGKSDKFTNLVATAVQANGTNKYVIIYKDKSASSSFARFRRSARSRRSLPAEMPLIPVNQADTLIVDGEAVSLTGHSGNIFAPEGNYRYLTYGAEKLPGGSYALRVQGEPSKGEMLAGTAVYNGEVLHFHTENGRPSPSRGRFAAKVDFGSKSVDGIIDSGDGLHMGTQKFKAAIDGNGFKGTWTENGGGDVSGKFYGPAGEEVAGKYSYRPTDAEKGGFGVFAGKKEQD

SEQ ID NO: 72985 - protein, 425 aa, Neisseria meningitidis
MFERSVIAMACIFALSACGGGGGGSPDVKSADTLSKPAAPVVAEKETEVKEDAPQAGSQGQGAPSTQGSQDMAAVSAENTGNGGAATTDKPKNEDEGPQNDMPQNSAESANQTGNNQPADSSDSAPASNPAPANGGSNFGRVDLANGVLIDGPSQNITLTHCKGDSCNGDNLLDEEAPSKSEFENLNESERIEKYKKDGKSDKFTNLVATAVQANGTNKYVIIYKDKSTSSARVRRSARSRRSLPAEMPLIPVNQADTLIVDGEAVSLTGHSGNIFAPEGNYRYLTYGAEKLSGGSYALSVQGEPAKGEMLAGTAVYNGEVLHFHTENGRPYPTKGRFAAKVDFGSKSVDGIIDSGDDLHMGKQKFKAAIDGNGFKGTWTENGGGDVSGRFYGPAGEEVAGKYSYRPTDAEKGGFGVFAGKKEQD

SEQ ID NO: 72986 - protein, 419 aa, Neisseria meningitidis
MFKRSVIAMACIVALSACGGGGGGSPDVKSADTPSKPAAPVVAEKETEVKEDAPQAGSQGQGAPSTQGSQDMAAVSAENTGNGGAATTDNPKNEDEGAQNDMPQNAAESANQTGNNQPAGSQNPAPSTNPNATNGGGNFGRVDLANGVLIDGPSQNITLTHCKGDSCNGDNLLAEEAPSKSEFEKLSDEDKISNYKKDGKDKFVGLIADRVKKDGTNKYIIFYTDKPPTRSARSRRSLPAEIPLIPVNQADTLIVDGEAVSLTGYSGNIFAPEGNYRYLTYGAEKLSGGSYALSVQGEPAKGEMLAGAAVYNGEVLHFHMENGRPYPSGGRFAAKVNFGSKSVDGIIDSGDDLHMGTQKFKAAIDGNGFKGTWTENGGGDVSGRFYGPAGEEVAGKYSYRPTDAEKGGFGVFVGKKEQD

SEQ ID NO: 72987 - protein, 488 aa, Neisseria meningitidis
MFKRSVIAMACIFALSACGGGGGGSPDVKSADTLSKPAAPVVSEKETEAKEDAPQAGSQGQGAPSAQGSQDMAAVSEENTGNGGAVTADNPKNEDEVAQNDMPQNAAGTDSSTPNHTPDPNMLAGNMENQATDAGESSQPANQPDMANAADGMQGDDPSAGGQNAGNTAAQGANQAGNNQAAGSSDPIPASNPAPANGGSNFGRVDLANGVLIDGPSQNITLTHCKGDSCSGNNFLDEEVQLKSEFEKLSDADKISNYKKDGKNDKFVGLVADSVQMKGTNQYIIFYKPKTTSSARFRRSARSRRSLPAEMPLIPVNQADTLIVDGEAVSLTGHSGNIFAPEGNYRYLTYGAEKLSGGSYALSVQGKPAKGEMLAGTAVYNGEVLHFHTENGRSYPTRGRFAAKVDFGSKSVDGIIDSGDDLHMGTQKFKAAIDGNGFKGNWTENGGGDVSGRFYGPAGEEVAGKYSYRPTDAEKGGFGVFAGKKEQD

SEQ ID NO: 72988 - protein, 486 aa, Neisseria meningitidis
MFKRSVIAMACIFALSACGGGGGGSPDVKSADTLSKPAAPVVSEKETEAKEDAPQAGSQGQGAPSAQGSQDMAAVSEENTGNGGAVTADNPKNEDEVAQNDMPQNAAGTDSSTPNHTPDPNMLAGNMENQATDAGESSQPANQPDMANAADGMQGDDPSAGGQNAGNTAAQGANQAGNNQAAGSSDPIPASNPAPANGGSNFGRVDLANGVLIDGPSQNITLTHCKSDSCNGDNLLSEEAPSKSEFEQLSDEDKIKKYKKDGEKFTGLVADRLQMKGTNQYIIFYKPKTTSSARFRRSARSRRSLPAEMPLIPVNQADTLIVDGEAVSLTGHSGNIFAPEGNYRYLTYGAEKLSGGSYALSVQGEPAKGEMLAGTAVYNGEVLHFHTENGRSYPTKGRFAAKVDFGSKSVDGIIDSGDDLHMGKQKFKAAIDGNGFKGTWTENSGGDVSGKFYGPAGEEVAGKYSYRPTDAEKGGFGVFAGKKEQD

SEQ ID NO: 72989 - protein, 480 aa, Neisseria meningitidis
MFKRSVIAMACIFALSACGGGGGGSPDVKSADTLSKPAVPVVSEKETEAKEDAPQAGSQGQGAPSAQGSQDMAAVSEENTGNGGAATADNPKNEDEGPQNDMPQNAADTDSLTPNHTPAPNMPTGDMGNQAPDYGESAQPENQPDAANAGDGIQGDDPSAGGENAGNTAAQGTNQAENNQAAGSQNPASSTNPSTTNSGGDFGRTNVGNSVVIDGPSQNITLTHCKGDSCNDDNLLYEEAPSKSEFESLSDEKKIEKYKKDGEKFTGLVAIKVENNGLNKYTIIYQAQPTRSARSRRSLPAEMPLIPVNQADTLIVDGEAVSLTGHSGNIFAPEGNYRYLTYGAEKLSGGSYALRVQGEPAKGEMLAGTAVYNGEVLHFHMENGRPSPFRGRFAAKVDFGSKYVDGIIDSGDDLHMGTQKFKAAIDGNGFKGTWTENGGGDVSGRFYGPAGEEVAGKYSYRPTDAEKGGFGVFAGKKEQD

SEQ ID NO: 72990 - protein, 495 aa, Neisseria meningitidis
MFKRSVIAMACIVALSACGGGGGGSPDVKSADTLSKPAAPVVAEDVEEEVLPKEKKDEEAVSGAPQADTQDTPTGKGGQDMAAVSEENTGNGGAATADNPKNEDEGAQDDMPQNAADTDSLTPNHTPASNMPAVNMENQAPDTGESVQPANQPDMANAADGMQGDDPSAGENAGNTAAQGANQAGNNQAAGSSDSTPASNPATTNSGGDFGRTNVANGVLIDGPSQNITLTHCKGDSCSGDNLLDEEAPSKSEFEKLSDADKINNYKKDGKNNNKFVGLVADRVKKDGTNKYIIFYTDKPPTRSARSRRSRRSLPAEMPLIPVNQADTLIVDGEAVSLTGHSGNIFAPEGNYRYLTYGAEKLPGGSYALRVQGEPAKGEMLAGAAVYNGEVLHFHTENGRSYPTRGRFAAKVDFGSKSVDGIIDSGDDLHMGTQKFKAAIDGNGFKGTWTENGGGDVSGKFYGPAGEEVAGKYSYRPTDAEKGGFGVFAGKKEQD
